(19) United States
(12) Patent Application Publication
(10) Pub. No.: US 2026/0048130 A1
(43) Pub. Date: Feb. 19, 2026

(54) ALPHA-V BETA-6 (avb6) INTEGRIN LIGANDS FOR EXTRAHEPATIC DELIVERY

(71) Applicant: Alnylam Pharmaceuticals, Inc., Cambridge, MA (US)

(72) Inventors: Jayaprakash K. Nair, Cambridge, MA (US); Joseph David Panarese, Newton, MA (US); Bhaumik Pandya, Bedford, MA (US); Karyn Schmidt, Melrose, MA (US); Kevin Dooley, Melrose, MA (US); Bryan Ingoglia, Waltham, MA (US); Oliver Galloway, Boston, MA (US); Masaaki Nakata, Cambridge, MA (US); Justin Pierson, Wakefield, MA (US); Yesseinia Anglero-Rodriguez, Cambridge, MA (US); Scott Lentini, Braintree, MA (US); Vasant R. Jadhav, Sharon, MA (US)

(21) Appl. No.: 19/235,730

(22) Filed: Jun. 12, 2025

Related U.S. Application Data
(63) Continuation of application No. PCT/US2023/083947, filed on Dec. 14, 2023.
(60) Provisional application No. 63/432,448, filed on Dec. 14, 2022.

(51) Int. Cl. A61K 47/54; A61K 9/00; A61P 25/28

(52) U.S. Cl. CPC A61K 47/545; A61K 9/0019; A61K 9/0043; A61K 9/007; A61P 25/28

(57) ABSTRACT

The present invention provides double stranded ribonucleic acid (dsRNA) agents for inhibiting expression of a target gene, comprising an antisense strand which is complementary to the target gene; a sense strand which is complementary to the antisense strand and forms a double stranded region with the antisense strand; and at least one alpha-v-beta-6 (αvβ6) integrin targeting ligand that mediates delivery to an extrahepatic tissues, e.g., muscle tissue, e.g., skeletal muscle tissue and/or cardiac muscle tissue, or lung tissue conjugated to at least one strand, compositions comprising such dsRNA agents, and methods of use thereof for treating a subject having a disorder that would benefit from reduction in expression of the target gene.

### CROSS-REFERENCE TO RELATED APPLICATIONS

[0001] This application is a 35 § U.S.C. 111(a) continuation application which claims the benefit of priority to International Application No. PCT/US2023/083947, filed on Dec. 14, 2023, which, in turn, claims the benefit of priority to U.S. Provisional Application No. 63/432,448, filed on Dec. 14, 2022. The entire contents of each of the foregoing applications are incorporated herein by reference.

### SEQUENCE LISTING

[0002] The instant application contains a Sequence Listing which has been submitted electronically in XML format and is hereby incorporated by reference in its entirety. Said XML copy, created on Jun. 4, 2025, is named 121301_21102_SL.xml and is 2,170,587 bytes in size.

### BACKGROUND OF THE INVENTION

[0003] Efficient delivery of an RNAi agent to cells in vivo requires specific targeting and substantial protection from the extracellular environment, particularly serum proteins. RNAi-based therapeutics show promising clinical data for treatment of liver-associated disorders. However, RNAi delivery into extra-hepatic tissues remains an obstacle, limiting the use of RNAi-based therapies.

[0004] One of the limiting factors is the ability to deliver intact RNAi efficiently to extra-hepatic tissues, such as muscle tissues, e.g., skeletal muscle tissues and/or cardiac muscle tissues, or lung tissue.

[0005] Previous work has used delivery reagents such as liposomes, cationic lipids, and nanoparticles forming complexes to aid the intracellular internalization of RNAi agents into extra-hepatic cells. However, only limited success in delivering RNAi agents to extra-hepatic tissues, like muscle tissue, after systemic administration has been reported. For example although cholesterol-conjugated RNAi agents are delivered to muscles after intravenous injection, a high dose (50 mg/kg) is required to achieve sustainable gene silencing. In addition, cholesterol conjugates are highly toxic at high concentrations, limiting their potential for clinical applications.

[0006] Thus, systemic delivery of oligonucleotides to muscle tissue remains a challenge and, accordingly, there is a continuing need for new and improved compositions and methods for delivering RNAi agents in vivo.

### SEQUENCE LISTING

[0007] This application contains a Sequence Listing which has been submitted electronically in .XML format and is hereby incorporated by reference in its entirety. Said .XML copy, created on Dec. 12, 2023, is named “121301_21120_SL.xml” and is 7,359,147 bytes in size. The sequence listing contained in this .XML file is part of the specification and is hereby incorporated by reference herein in its entirety.

### SUMMARY OF THE INVENTION

[0008] The present invention is based, at least in part, on the discovery of alpha-v-beta-6 (αvβ6) integrin binding compounds suitable for conjugating to a cargo molecule to be delivered to a cell (e.g., single- and double-stranded oligonucleotides) and the surprising discovery that conjugating at least one such alpha-v-beta-6 (αvβ6) integrin binding compound to at least one strand of a dsRNA agent, e.g., the sense strand, provides surprisingly efficient in vivo delivery to extrahepatic tissue expressing αvβ6, i.e., muscle tissue, resulting in efficient entry and internalization of the dsRNA agent into extrahepatic tissue, e.g., muscle tissue, e.g., skeletal muscle tissue and/or cardiac muscle tissue, or lung tissue, and surprisingly good inhibition of target gene expression in extrahepatic tissue, e.g., muscle tissue, e.g., skeletal muscle tissue and/or cardiac muscle tissue, or lung tissue.

[0009] Accordingly, in one aspect, the present invention provides a double stranded ribonucleic acid (dsRNA) agent for inhibiting expression of a target gene, comprising an antisense strand which is complementary to the target gene; a sense strand which is complementary to the antisense strand and forms a double stranded region with the antisense strand; and at least one alpha-v-beta-6 (αvβ6) integrin targeting ligand that mediates delivery to muscle tissue, e.g., skeletal muscle tissue and/or cardiac muscle tissue, conjugated to at least one strand.

[0010] In another aspect, the present invention provides a double stranded ribonucleic acid (dsRNA) agent for inhibiting expression of a target gene, comprising an antisense strand which is complementary to the target gene; a sense strand which is complementary to the antisense strand and forms a double stranded region with the antisense strand; and at least one alpha-v-beta-6 (αvβ6) integrin targeting ligand that mediates delivery to lung tissue conjugated to at least one strand.

[0011] Exemplary ligands can be found in U.S. Pat. Nos. 10,023,568, 10,450,312, 10,144,733, 10,487,080, 10,513,517, and 10,000,489, the entire contents of each of which are incorporated herein by reference.

[0012] In one embodiment, the ligand is conjugated to the dsRNA agent via a linker comprising a compound of the structure

[chemical structure]

[0013] In one embodiment, the ligand comprises a compound of the structure

[chemical structure]

### (SEQ ID NO: 121).

[0014] In one embodiment, the ligand comprises a compound of the structure

[chemical structure]

(SEQ ID NO: 122) In one embodiment, the ligand comprises a compound of the structure

[chemical structure]

[0015] In one embodiment, the ligand comprises a compound of the structure

[chemical structure]

[0016] In some embodiments the ligand comprises a compound of Formula (I)

[chemical structure]

wherein:
[0017] Q1 is selected from the group consisting of H, halogen, OR1, NR1R2, an optionally substituted sulfonyl, optionally substituted C1-C6 alkyl, optionally substituted C3-C7 cycloalkyl, optionally substituted heterocyclic, optionally substituted aryl and optionally substituted heteroaryl;
[0018] Q2 and Q4 are each independently selected from the group consisting of an optionally substituted C1-C6 alkyl, optionally substituted C3-C7 cycloalkyl, optionally substituted heterocyclic, optionally substituted aryl and optionally substituted heteroaryl;
[0019] Q3 is a linker;
[0020] Q5 is an optionally substituted C1-C6 alkyl, optionally substituted C3-C7 cycloalkyl, O, or NR1; and
[0021] Q6 is optionally substituted C4-C7 cycloalkyl, optionally substituted heterocyclic, optionally substituted aryl or optionally substituted heteroaryl; and
[0022] R1 and R2 are each independently selected from the group consisting of H, an optionally substituted carbonyl, optionally substituted alkyl, optionally substituted aryl and optionally substituted heterocyclic group.

[0023] In some embodiments the ligand comprises a compound of Formula (II)

[chemical structure]

wherein:
[0024] Q1, Q7, Q8, Q9, and Q10 are each independently selected from the group consisting of H, halogen, OR1, NR1R2, an optionally substituted sulfonyl, guanidyl, optionally substituted C1-C6 alkyl, optionally substituted C3-C7 cycloalkyl, optionally substituted heterocyclic, optionally substituted aryl and optionally substituted heteroaryl;
[0025] Q2 and Q4 are independently selected from the group consisting of an optionally substituted C1-C6 alkyl, optionally substituted C3-C7 cycloalkyl, optionally substituted heterocyclic, optionally substituted aryl and optionally substituted heteroaryl;
[0026] Q3 is a linker;
[0027] Q5 is optionally substituted C1-C6 alkyl, optionally substituted C3-C7 cycloalkyl, O, or NR1; and
[0028] R1 and R2 are each independently selected from the group consisting of H, an optionally substituted carbonyl, optionally substituted alkyl, optionally substituted aryl and optionally substituted heterocyclic group.

[0029] Alternatively, Q9 and Q10, together with the atoms to which they are connected, can combine to form an optionally substituted carbocyclic or heterocyclic ring.

[0030] In some embodiments the ligand comprises a compound of Formula (III)

[chemical structure]

wherein:
[0031] Q1 is selected from the group consisting of H, halogen, NR1R2, OR3, an optionally substituted sulfonyl, optionally substituted C1-C6 alkyl, optionally substituted C3-C7 cycloalkyl, optionally substituted heterocyclic, optionally substituted aryl and optionally substituted heteroaryl
[0032] Q2 and Q4 are each independently selected from the group consisting of an optionally substituted C1-C6 alkyl, optionally substituted C3-C7 cycloalkyl, optionally substituted heterocyclic, optionally substituted aryl and optionally substituted heteroaryl;
[0033] Q3 is a linker;
[0034] Q5 is an optionally substituted C1-C6 alkyl, optionally substituted C3-C7 cycloalkyl, O, or NR3;
[0035] Q6 is an optionally substituted C4-C7 cycloalkyl, optionally substituted heterocyclic, optionally substituted aryl or optionally substituted heteroaryl.
[0036] L1 and L2 are each independently selected from the group consisting of an optionally substituted alkyl, carbonyl, sulfonyl and NR3;
[0037] R1 and R2 are each independently selected from the group consisting of H, an optionally substituted carbonyl, an optionally substituted alkyl, an optionally substituted aryl and an optionally substituted heterocyclic group; and
[0038] R3 is selected from the group consisting of H, an optionally substituted alkyl, an optionally substituted aryl and an optionally substituted heterocyclic group.

[0039] In one embodiment, the ligand comprises the structure:

[chemical structure]

wherein * represents the bond to an oligonucleotide; for example, to the 3′-end of an oligonucleotide via a phosphodiester or phosphorothioate linkage.

[0040] In one embodiment, the ligand comprises the structure:

[chemical structure]

wherein * represents the bond to an oligonucleotide; for example, to the 3′-end of an oligonucleotide via a phosphodiester or phosphorothioate linkage.

[0041] In one embodiment, the ligand comprises the structure:

[chemical structure]

wherein * represents the bond to an oligonucleotide; for example, to the 3′-end of an oligonucleotide via a phosphodiester or phosphorothioate linkage.

[0042] In one embodiment, the ligand comprises the structure:

[chemical structure]

or a salt thereof, wherein * represents the bond to an oligonucleotide; for example, to the 5′-end of an oligonucleotide.

[0043] In one embodiment, the ligand comprises the structure:

[chemical structure]

or a salt thereof, wherein * represents the bond to an oligonucleotide; for example, to the 5′-end of an oligonucleotide.

[0044] In some embodiments, a suitable ligand and/or ligand and linker for use in the present invention is selected from any one of the compounds shown in the table below:

[chemical structure]

[chemical structure]

[chemical structure]

[chemical structure]

[chemical structure]

wherein Z1 is a linking group connecting to an oligonucleotide.

[0045] In one embodiment, the ligand is conjugated to the sense strand, e.g., the 3′-end of the sense strand; the 5′-end of the sense strand; or both the 5′-end and the 3′-end of the sense strand.

[0046] In one embodiment, the ligand is conjugated to an internal position on the sense strand, e.g., a 2′-position on a nucleotide or a modified internucleotide linkage. In one embodiment, the ligand is conjugated to a 2′-position on a nucleotide of the sense strand.

[0047] In another embodiment, the ligand is conjugated to the antisense strand, e.g., the 3′-end of the antisense strand; the 5′-end of the antisense strand; or both the 5′-end and the 3′-end of the antisense strand.

[0048] In one embodiment, the ligand is conjugated to an internal position on the antisense strand, e.g., a 2′-position on a nucleotide or a modified internucleotide linkage. In one embodiment, the ligand is conjugated to a 2′-position on a nucleotide of the antisense strand.

[0049] In one embodiment, the target gene is selected from the group consisting of myostatin (MSTN); Cholinergic Receptor Nicotinic Alpha 1 Subunit (CHRNA1); Cholinergic Receptor Nicotinic Beta 1 Subunit (CHRNB1); Cholinergic Receptor Nicotinic Delta Subunit (CHRND); Cholinergic Receptor Nicotinic Epsilon Subunit (CHRNE); Cholinergic Receptor Nicotinic Gamma Subunit (CHRNG); Collagen Type XIII Alpha 1 Chain (COL13A1); Docking Protein 7 (DOK7); LDL Receptor Related Protein 4 (LRP4); Muscle Associated Receptor Tyrosine Kinase (MUSK); Receptor Associated Protein Of The Synapse (RAPSN); Sodium Voltage-Gated Channel Alpha Subunit 4 (SCN4A); and Double Homeobox 4 (DUX4), dystrophy myotonic protein kinase (DMPK), glycogen synthase 1 (GYS1), survival of motor neuron 1 (SMN1), alpha-glucosidase (GAA); adrenoceptor beta 1 (ADRB1); calcium voltage-gated channel subunit alpha1 C (CACNA1C); calcium voltage-gated channel subunit alpha1 G (CACNA1G) (T type calcium cchannel); angiotensin II receptor type 1 (AGTR1); Sodium Voltage-Gated Channel Alpha Subunit 2 (SCN2A); Hyperpolarization Activated Cyclic Nucleotide Gated Potassium Channel 1 (HCN1); Hyperpolarization Activated Cyclic Nucleotide Gated Potassium Channel 4 (HCN4); Hyperpolarization Activated Cyclic Nucleotide Gated Potassium Channel 3 (HCN3); Potassium Voltage-Gated Channel Subfamily A Member 5 (KCNA5); Potassium Inwardly Rectifying Channel Subfamily J Member 3 (KCNJ3); Potassium Inwardly Rectifying Channel Subfamily J Member 4 (KCNJ4); phospholamban (PLN); calcium/calmodulin dependent protein kinase II delta (CAMK2D); or Phosphodiesterase 1 (PDE1).

[0050] In one embodiment, the target gene is selected from the group consisting of myostatin (MSTN); Cholinergic Receptor Nicotinic Alpha 1 Subunit (CHRNA1); Cholinergic Receptor Nicotinic Beta 1 Subunit (CHRNB1); Cholinergic Receptor Nicotinic Delta Subunit (CHRND); Cholinergic Receptor Nicotinic Epsilon Subunit (CHRNE); Cholinergic Receptor Nicotinic Gamma Subunit (CHRNG); Collagen Type XIII Alpha 1 Chain (COL13A1); Docking Protein 7 (DOK7); LDL Receptor Related Protein 4 (LRP4); Muscle Associated Receptor Tyrosine Kinase (MUSK); Receptor Associated Protein Of The Synapse (RAPSN); Sodium Voltage-Gated Channel Alpha Subunit 4 (SCN4A); and Double Homeobox 4 (DUX4), dystrophy myotonic protein kinase (DMPK), glycogen synthase 1 (GYS1), survival of motor neuron 1 (SMN1), and alpha-glucosidase (GAA).

[0051] In one embodiment, the target gene is selected from the group consisting of adrenoceptor beta 1 (ADRB1); calcium voltage-gated channel subunit alpha1 C (CACNA1C); calcium voltage-gated channel subunit alpha1 G (CACNA1G) (T type calcium cchannel); angiotensin II receptor type 1 (AGTR1); Sodium Voltage-Gated Channel Alpha Subunit 2 (SCN2A); Hyperpolarization Activated Cyclic Nucleotide Gated Potassium Channel 1 (HCN1); Hyperpolarization Activated Cyclic Nucleotide Gated Potassium Channel 4 (HCN4); Hyperpolarization Activated Cyclic Nucleotide Gated Potassium Channel 3 (HCN3); Potassium Voltage-Gated Channel Subfamily A Member 5 (KCNA5); Potassium Inwardly Rectifying Channel Subfamily J Member 3 (KCNJ3); Potassium Inwardly Rectifying Channel Subfamily J Member 4 (KCNJ4); phospholamban (PLN); calcium/calmodulin dependent protein kinase II delta (CAMK2D); or Phosphodiesterase 1 (PDE1).

[0052] In one embodiment, the target gene is selected from the group consisting of MUC5B, TSLP, IL33, ALOX15, AGER(RAGE), MUC5AC, and STAT6.

[0053] In one aspect, the present invention provides cells containing any of the dsRNA agents of the invention.

[0054] In another aspect, the present invention provides a pharmaceutical composition for inhibiting expression of the target gene, comprising any of the dsRNA agents of the invention.

[0055] In one embodiment, the dsRNA agent is present in a buffer solution, e.g., a buffer solution comprising acetate, citrate, prolamine, carbonate, or phosphate, or any combination thereof. In one embodiment, the buffer solution is phosphate buffered saline (PBS). In other embodiments, the dsRNA agent is present in an unbuffered solution, e.g., in water or normal saline.

[0056] In one aspect, the present invention provides a method of inhibiting expression of a target gene in a skeletal muscle cell and/or a cardiac muscle cell. The method includes contacting the cell with any of the dsRNA agents of the invention or any of the pharmaceutical compositions of the invention, e.g., and maintaining the cell produced in step (a) for a time sufficient to obtain degradation of the mRNA transcript of the target gene in the skeletal muscle cell and/or cardiac muscle cell, thereby inhibiting expression of the target gene in the skeletal muscle cell and/or cardiac muscle cell.

[0057] In one aspect, the present invention provides a method of inhibiting expression of a target gene in a lung cell. The method includes contacting the cell with any of the dsRNA agents of the invention or any of the pharmaceutical compositions of the invention, e.g., and maintaining the cell produced in step (a) for a time sufficient to obtain degradation of the mRNA transcript of the target gene in the lung cell, thereby inhibiting expression of the target gene in the lung cell.

[0058] In one embodiment, the cell is within a subject, e.g., human subject.

[0059] In certain embodiments, contacting the cell with the dsRNA agent or pharmaceutical composition inhibits the expression of the target gene by at least about 30%, 40%, 50%, 60%, 70%, 80%, 90%, or 95%.

[0060] In one embodiment, inhibiting expression of the target gene decreases the target gene protein level in serum of the subject by at least 30%, 40%, 50%, 60%, 70%, 80%, 90%, or 95%.

[0061] In one aspect, the present invention provides a method of treating a subject having a muscle disorder, e.g., a skeletal muscle disorder and/or a cardiac muscle disorder. The method includes administering to the subject a therapeutically effective amount of any of the dsRNA agents of the invention or any of the pharmaceutical compositions of the invention, thereby treating the subject.

[0062] In one embodiment, the muscle disorder is selected from the group consisting of Myostatin-related muscle hypertrophy, congenital myasthenic syndrome, facioscapulohumeral muscular dystrophy (FSHD), Spinal Muscular Atrophy (SMA), Myotonic Dystrophy Type 1 (DM1), Pompe disease, PLN cardiomyopathy, spasticity, obstructive hypertrophic cardiomyopathy (HOCM); familial hypertrophic cardiomyopathy (FHC); Heart failure with preserved ejection fraction (HFPEF); atrial fibrillation (AFIB); ventricular fibrillation (VFIB); angina; myocardial infarction (MI); heart failure or heart failure with reduced ejection fraction (HFREF); supraventricular tachycardia (SVT); hypertrophic cardiomyopathy (HCM); and PLN cardiomyopathy.

[0063] In one embodiment, the skeletal muscle disorder is selected from the group consisting of Myostatin-related muscle hypertrophy, congenital myasthenic syndrome, facioscapulohumeral muscular dystrophy (FSHD), Spinal Muscular Atrophy (SMA), Myotonic Dystrophy Type 1 (DM1), Pompe disease, PLN cardiomyopathy, and spasticity.

[0064] In one embodiment, the cardiac muscle disorder is selected from the group consisting of obstructive hypertrophic cardiomyopathy (HOCM); familial hypertrophic cardiomyopathy (FHC); Heart failure with preserved ejection fraction (HFPEF); atrial fibrillation (AFIB); ventricular fibrillation (VFIB); angina; myocardial infarction (MI); heart failure or heart failure with reduced ejection fraction (HFREF); supraventricular tachycardia (SVT); hypertrophic cardiomyopathy (HCM); and PLN cardiomyopathy.

[0065] In one aspect, the present invention provides a method of treating a subject having a lung disorder. The method includes administering to the subject a therapeutically effective amount of any of the dsRNA agents of the invention or any of the pharmaceutical compositions of the invention, thereby treating the subject.

[0066] In one embodiment, the lung disorder is selected from the group consisting of pulmonary fibrosis e.g. idiopathic pulmonary fibrosis, non-specific interstitial pneumonia (NSIP), usual interstitial pneumonia (UIP), Hermansky-Pudlak syndrome, progressive massive fibrosis (a complication of coal workers' pneumoconiosis), connective tissue disease-related pulmonary fibrosis, airway fibrosis in asthma and COPD, acute respiratory distress syndrome (ARDS) associated fibrosis, acute lung injury; radiation-induced fibrosis; familial pulmonary fibrosis; pulmonary hypertension, asthma, asthma and chronic rhinosinusitis, and nasal polyps and chronic rhinosinusitis.

[0067] The dsRNA agent or pharmaceutical composition may be administered to the subject subcutaneously, intramuscularly, intravenously, or via inhalation.

[0068] In one embodiment, the therapeutic methods of the invention further include administering to the subject an additional agent or a therapy suitable for treatment or prevention of an extrahepatic disorder.

### BRIEF DESCRIPTION OF THE DRAWINGS

[0069] FIG. 1 are graphs depicting the inhibition of Sod1 mRNA expression in mouse quadriceps, heart, liver, and lung 21 days after a single 2 mg/kg intravenous dose of AD-1427062, AD-1534458, AD-1534460, AD-1481903, AD-1481901, or AD-1481902, or PBS control.

[0070] FIG. 2 are graphs depicting the inhibition of Sod1 mRNA expression in mouse gastrocnemius and quadriceps 21 days after a single 2 mg/kg intravenous dose of AD-2032892 or PBS control.

[0071] FIG. 3 is a graph depicting the inhibition of Sod1 mRNA expression in cynomolgus monkey heart, quadriceps, liver, gastrocnemius, and kidney 30 days after a single 10 mg/kg intravenous dose of AD-2032892 or PBS control.

[0072] FIG. 4 is a graph depicting the inhibition of Sod1 mRNA expression in mouse lung 21 days after a single 0.5 mg/kg intratracheal dose of AD-1481901, AD-2032892, or PBS control.

[0073] FIG. 5 is a graph depicting the inhibition of Sod1 mRNA expression in mouse lung 21 days after a single 0.5 mg/kg intranasal dose of AD-1481901, AD-2032892, or PBS control.

[0074] FIG. 6 is a graph depicting the inhibition of Sod1 mRNA expression in mouse lung 21 days after a single 2 mg/kg oropharyngeal aspiration dose of AD-2032892 or PBS control.

[0075] FIG. 7 is a graph depicting the inhibition of Sod1 mRNA expression in cynomolgus monkey lung 30 days after a single 5 mg/kg or 10 mg/kg intravenous dose of AD-2032892 or PBS control.

[0076] FIG. 8 is a graph depicting the inhibition of Sod1 mRNA expression in mouse lung 10 days after a single 1 mg/kg or 10 mg/kg intranasally administered dose of the indicated agents or PBS control.

[0077] FIG. 9 is a comparative illustration of Formulae (IV), (V), (X), (XII), and (XV), herein; embodiments for variables of one Formula are equally applicable to the variable in another formula as delineated by the columns defined by the dotted vertical lines; in each case the variables among the various formulae have the same name, except for L′ of Formula (X) and T of formulas (V) and (XV).

[0078] FIG. 10 is an illustration of a process for preparing an oligonucleotide conjugate of the disclosure where a compound of Formula (IV) or (V), each with a first member of a reactive pair (Z, and Z°, respectively) is contacted with an oligonucleotide comprising the second member of the reactive pair (Z′), to provide the conjugated oligonucleotide with a ZZ covalent construct resulting from the reactive pair; the oligonucleotide can be modified with the second member of the reactive pair at the 5′-terminus, the 3′-terminus or at an internal position (e.g., 2′-0 or at an internucleotide linkage of a nucleoside).

[0079] FIG. 11 is an illustration of representative embodiments of Formula (X), wherein R^{T1} is either a phosphorous coupling group (providing, for example, a phosphoramidite); an oligonucleotide connected through a divalent linking group (L^{L}); or a solid-supported ligand, suitable for solid-phase oligonucleotide synthesis where the ligand of Formula (X) is attached to a surface functional group of the solid support via a divalent support linking group (L^{K}); divalent linking group (L^{L}) can connect to the oligonucleotide at the 5′-terminus (e.g., the 5′-0), the 3′-terminus (e.g., the 3′-0), or at an internal position (e.g., 2′-0 or at an internucleotide linkage of a nucleoside).

[0080] FIG. 12 is an illustration of representative embodiments of Formula (XV), wherein R^{T1} is either a phosphorous coupling group (providing, for example, a phosphoramidite); an oligonucleotide connected through a divalent linking group (L^{L}); or a solid-supported ligand, suitable for solid-phase oligonucleotide synthesis where the ligand of Formula (XV) is attached to a surface functional group of the solid support via a divalent support linking group (L^{K}); divalent linking group (L^{L}) can connect to the oligonucleotide at the 5′-terminus (e.g., the 5′-0), the 3′-terminus (e.g., the 3′-0), or at an internal position (e.g., 2′-0 or at an internucleotide linkage of a nucleoside).

### DETAILED DESCRIPTION

[0081] The present invention is based, at least in part, on the discovery of alpha-v-beta-6 (αvβ6) integrin compounds and the surprising discovery that conjugating at least one such alpha-v-beta-6 (αvβ6) integrin compound to at least one strand of a dsRNA agent, e.g., the sense strand, provides surprisingly efficient in vivo delivery to extrahepatic tissue, i.e., muscle tissue, resulting in efficient entry and internalization of the dsRNA agent into extrahepatic tissue, e.g., muscle tissue, e.g., skeletal muscle tissue and/or cardiac muscle tissue, or lung tissue, and surprisingly good inhibition of target gene expression in extrahepatic tissue, e.g., muscle tissue, e.g., skeletal muscle tissue and/or cardiac muscle tissue, or lung tissue.

[0082] The following detailed description discloses how to make and use alpha-v-beta-6 (αvβ6) integrin compounds, compositions containing dsRNA agents comprising such compounds that mediates delivery to extrahepatic tissue, e.g., muscle tissue, e.g., skeletal muscle tissue and/or cardiac muscle tissue, or lung tissue, conjugated to at least one strand to inhibit the expression of a target gene as well as compositions, uses, and methods for treating subjects that would benefit from inhibition and/or reduction of the expression of the target gene.

### I. Definitions

[0083] In order that the present disclosure may be more readily understood, certain terms are first defined. In addition, it should be noted that whenever a value or range of values of a parameter are recited, it is intended that values and ranges intermediate to the recited values are also intended to be part of this disclosure.

[0084] In order that the present invention may be more readily understood, certain terms are first defined. In addition, it should be noted that whenever a value or range of values of a parameter are recited, it is intended that values and ranges intermediate to the recited values are also intended to be part of this invention.

[0085] The articles “a” and “an” are used herein to refer to one or to more than one (i.e., to at least one) of the grammatical object of the article. By way of example, “an element” means one element or more than one element, e.g., a plurality of elements.

[0086] The term “including” is used herein to mean, and is used interchangeably with, the phrase “including but not limited to”.

[0087] The term “or” is used herein to mean, and is used interchangeably with, the term “and/or,” unless context clearly indicates otherwise. For example, “sense strand or antisense strand” is understood as “sense strand or antisense strand or sense strand and antisense strand.”

[0088] The term “about” is used herein to mean within the typical ranges of tolerances in the art. For example, “about” can be understood as about 2 standard deviations from the mean. In certain embodiments, about means +10%. In certain embodiments, about means +5%. When about is present before a series of numbers or a range, it is understood that “about” can modify each of the numbers in the series or range.

[0089] The term “at least”, “no less than”, or “or more” prior to a number or series of numbers is understood to include the number adjacent to the term “at least”, and all subsequent numbers or integers that could logically be included, as clear from context. For example, the number of nucleotides in a nucleic acid molecule must be an integer. For example, “at least 19 nucleotides of a 21 nucleotide nucleic acid molecule” means that 19, 20, or 21 nucleotides have the indicated property. When at least is present before a series of numbers or a range, it is understood that “at least” can modify each of the numbers in the series or range.

[0090] As used herein, “no more than” or “or less” is understood as the value adjacent to the phrase and logical lower values or integers, as logical from context, to zero. For example, a duplex with an overhang of “no more than 2 nucleotides” has a 2, 1, or 0 nucleotide overhang. When “no more than” is present before a series of numbers or a range, it is understood that “no more than” can modify each of the numbers in the series or range. As used herein, ranges include both the upper and lower limit.

[0091] As used herein, methods of detection can include determination that the amount of analyte present is below the level of detection of the method.

[0092] In the event of a conflict between an indicated target site and the nucleotide sequence for a sense or antisense strand, the indicated sequence takes precedence.

[0093] In the event of a conflict between a sequence and its indicated site on a transcript or other sequence, the nucleotide sequence recited in the specification takes precedence.

[0094] Terms used herein may be preceded and/or followed by a single dash, or a double dash, “=”, to indicate the bond order of the bond between the named substituent and its parent moiety; a single dash indicates a single bond and a double dash indicates a double bond or a pair of single bonds in the case of a spiro-substituent. In the absence of a single or double dash it is understood that a single bond is formed between the substituent and its parent moiety; further, substituents are intended to be read “left to right” unless a dash indicates otherwise. For example, C₁₋₆alkoxycarbonyloxy and —OC(O)C₁₋₆alkyl indicate the same functionality; similarly arylalkyl, arylalkyl-, and -alkylaryl indicate the same functionality.

[0095] Further, certain terms herein may be used as both monovalent and divalent linking radicals as would be familiar to those skilled in the art, and by their presentation linking between two other moieties. For example, an alkyl group can be both a monovalent radical or divalent radical; in the latter case, it would be apparent to one skilled in the art that an additional hydrogen atom is removed from a monovalent alkyl radical to provide a suitable divalent moiety.

[0096] Throughout the disclosure, [symbol] is used to represent an oligonucleotide; such oligonucleotides may be an RNA, a DNA, a single-stranded RNA, such as an antisense oligonucleotide (ASO), a double-stranded RNA, such as an siRNA, and oligonucleotide derivatives such as phosphorodiamidate morpholino oligomers (PMOs).

[0097] The term “alkenyl” as used herein, means a straight or branched chain hydrocarbon containing from 2 to 10 carbons, unless otherwise specified, and containing at least one carbon-carbon double bond. Representative examples of alkenyl include, but are not limited to, ethenyl, 2-propenyl, 2-methyl-2-propenyl, 3-butenyl, 4-pentenyl, 5-hexenyl, 2-heptenyl, 2-methyl-1-heptenyl, 3-decenyl, and 3,7-dimethylocta-2,6-dienyl.

[0098] The term “alkynyl” as used herein means a straight or branched hydrocarbon chain containing from 2 to 10 carbons, unless otherwise specified, and containing at least one carbon-carbon triple bond. Representative examples of alkynyl include, but are not limited to, 1-butynyl, 2-butynyl, 1-propynyl and the like.

[0099] The term “alkoxy” as used herein, means an alkyl group, as defined herein, appended to the parent molecular moiety through an oxygen atom. Representative examples of alkoxy include, but are not limited to, methoxy, ethoxy, n-propoxy, 2-propoxy, n-butoxy, tert-butoxy, n-pentyloxy, and n-hexyloxy.

[0100] The term “alkyl” as used herein, means a straight or branched chain hydrocarbon containing from 1 to 10 carbon atoms, unless otherwise specified. Representative examples of alkyl include, but are not limited to, methyl, ethyl, n-propyl, iso-propyl, n-butyl, sec-butyl, iso-butyl, tert-butyl, n-pentyl, isopentyl, neopentyl, n-hexyl, 3-methylhexyl, 2,2-dimethylpentyl, 2,3-dimethylpentyl, n-heptyl, n-octyl, n-nonyl, and n-decyl. When an “alkyl” group is a divalent linking group between two other moieties, then it may also be a straight or branched chain; examples include, but are not limited to —CH₂—, —CH₂CH₂—, —CH₂CH₂CHC(CH₃)—, —CH₂CH(CH₂CH₃)CH₂—.

[0101] The term “aryl,” as used herein, means a phenyl (i.e., monocyclic aryl); naphthyl or azulenyl; a bicyclic ring system containing a phenyl fused to a cycloalkyl, cycloalkenyl, or heterocyclyl ring. Representative examples of the bicyclic aryls include, but are not limited to, azulenyl, naphthyl, 2,3-dihydroinden-1-yl, 2,3-dihydroinden-2-yl, 2,3-dihydroinden-3-yl, 2,3-dihydroinden-4-yl, 2,3-dihydroinden-5-yl, 2,3-dihydroindol-1-yl, indolin-2-yl, indolin-3-yl, indolin-4-yl, indolin-5-yl, indolin-6-yl, indolin-7-yl, inden-1-yl, inden-2-yl, inden-3-yl, inden-4-yl, dihydronaphthalen-2-yl, dihydronaphthalen-3-yl, dihydronaphthalen-4-yl, dihydronaphthalen-1-yl, 5,6,7,8-tetrahydronaphthalen-1-yl, 5,6,7,8-tetrahydronaphthalen-2-yl, 2,3-dihydrobenzofuran-2-yl, 2,3-dihydrobenzofuran-3-yl, 2,3-dihydrobenzofuran-4-yl, 2,3-dihydrobenzofuran-5-yl, 2,3-dihydrobenzofuran-6-yl, 2,3-dihydrobenzofuran-7-yl, 2,3-dihydrobenzothien-2-yl, 2,3-dihydrobenzothien-3-yl, 2,3-dihydrobenzothien-4-yl, 2,3-dihydrobenzothien-5-yl, 2,3-dihydrobenzothien-6-yl, 2,3-dihydrobenzothien-7-yl, 2,3-dihydrobenzothien-8-yl, benzo[d][1,3]dioxol-4-yl, benzo[d][1,3]dioxol-5-yl, 2H-chromen-2-on-3-yl, 2H-chromen-2-on-4-yl, 2H-chromen-2-on-5-yl, 2H-chromen-2-on-6-yl, 2H-chromen-2-on-7-yl, 2H-chromen-2-on-8-yl, isoindoline-1,3-dion-2-yl, isoindoline-1,3-dion-4-yl, isoindoline-1,3-dion-5-yl, inden-1-on-2-yl, inden-1-on-3-yl, inden-1-on-4-yl, inden-1-on-5-yl, inden-1-on-6-yl, inden-1-on-7-yl, 2,3-dihydrobenzo[b][1,4]dioxan-2-yl, 2,3-dihydrobenzo[b][1,4]dioxan-5-yl, 2,3-dihydrobenzo[b][1,4]dioxan-6-yl, 2H-benzo[b][1,4]oxazin-3(4H)-on-5-yl, 2H-benzo[b][1,4]oxazin-3(4H)-on-6-yl, 2H-benzo[b][1,4]oxazin-3(4H)-on-7-yl, 2H-benzo[b][1,4]oxazin3(4H)-on-8-yl, quinazolin-4(3H)-on-5-yl, quinazolin-4(3H)-on-6-yl, quinazolin-4(3H)-on-7-yl, quinazolin-4(3H)-on-8-yl, quinoxalin-2(1H)-on-5-yl, quinoxalin-2(1H)-on-6-yl, quinoxalin-2(1H)-on-7-yl, quinoxalin-2(1H)-on-8-yl, benzo[d]thiazol-2(3H)-on-3-yl, benzo[d]thiazol-2(3H)-on-4-yl, benzo[d]thiazol-2(3H)-on-5-yl, benzo[d]thiazol-2(3H)-on-6-yl, and, benzo[d]thiazol-2(3H)-on-7-yl.

[0102] In certain embodiments, the bicyclic aryl is (i) naphthyl or (ii) a phenyl ring fused to either a 5 or 6 membered monocyclic cycloalkyl, a 5 or 6 membered monocyclic cycloalkenyl, or a 5 or 6 membered monocyclic heterocyclyl, wherein the fused cycloalkyl, cycloalkenyl, and heterocyclyl groups are optionally substituted with one or two groups which are independently oxo or thia.

[0103] The term “arylalkyl,” “aralkyl”, “-alkylaryl,” and “arylalkyl-” as used herein, means an aryl group, as defined herein, appended to the parent molecular moiety through an alkyl group, as defined herein. Representative examples of arylalkyl include, but are not limited to, benzyl, 2-phenylethyl, 3-phenylpropyl, and 2-naphth-2-ylethyl.

[0104] The term “azido” means a —N₃ group.

[0105] The term “carboxy” means a —COOH group.

[0106] The terms “cyano” and “nitrile” as used herein, mean a —CN group.

[0107] The term “cycloalkyl” as used herein, means a monocyclic or a bicyclic cycloalkyl ring system.

[0108] Monocyclic ring systems are cyclic hydrocarbon groups containing from 3 to 10 carbon atoms, where such groups are saturated. Examples of monocyclic cycloalkyls include cyclopropyl, cyclobutyl, cyclopentyl, cyclohexyl, cycloheptyl, and cyclooctyl. Bicyclic cycloalkyl ring systems are bridged monocyclic rings or fused bicyclic rings. Bridged monocyclic rings contain a monocyclic cycloalkyl ring where two non-adjacent carbon atoms of the monocyclic ring are linked by an alkylene bridge of between one and three additional carbon atoms (i.e., a bridging group of the form —(CH₂)_{w}—, where w is 1, 2, or 3). Representative examples of bridged bicyclic ring systems include, but are not limited to, bicyclo[3.1.1]heptane, bicyclo[2.2.1]heptane, bicyclo[2.2.2]octane, bicyclo[3.2.2]nonane, bicyclo[3.3.1]nonane, and bicyclo[4.2.1]nonane. Fused bicyclic cycloalkyl ring systems contain a monocyclic cycloalkyl ring fused to a monocyclic cycloalkyl. Representative examples of fused bicyclic ring systems include, but are not limited to, decaliyl. Cycloalkyl groups are optionally substituted with one or two groups which are independently oxo or thia. In certain embodiments, the fused bicyclic cycloalkyl is a 5 or 6 membered monocyclic cycloalkyl ring fused to a 5 or 6 membered monocyclic cycloalkyl, wherein the fused bicyclic cycloalkyl is optionally substituted by one or two groups which are independently oxo or thia.

[0109] “Cycloalkenyl” as used herein refers to a monocyclic or a bicyclic cycloalkenyl ring system. Monocyclic ring systems are cyclic hydrocarbon groups containing from 3 to 8 carbon atoms, where such groups are unsaturated (i.e., containing at least one annular carbon-carbon double bond), but not aromatic. Examples of monocyclic ring systems include cyclopentenyl and cyclohexenyl. Bicyclic cycloalkenyl rings are bridged monocyclic rings or a fused bicyclic rings. Bridged monocyclic rings contain a monocyclic cycloalkenyl ring where two non-adjacent carbon atoms of the monocyclic ring are linked by an alkylene bridge of between one and three additional carbon atoms (i.e., a bridging group of the form —(CH₂)_{w}—, where w is 1, 2, or 3). Representative examples of bicyclic cycloalkenyls include, but are not limited to, norbornenyl and bicyclo[2.2.2]oct-2-enyl. Fused bicyclic cycloalkenyl ring systems contain a monocyclic cycloalkenyl ring fused to either a monocyclic cycloalkyl or a monocyclic cycloalkenyl. Cycloalkenyl groups are optionally substituted with one or two groups which are independently oxo or thia.

[0110] The term “monocyclic ring”, as used herein, comprises monocyclic aryl, monocyclic cycloalkyl, monocyclic cycloalkenyl and monocyclic heterocyclyl.

[0111] The term “halo” or “halogen” as used herein, means —Cl, —Br, —I or —F.

[0112] The term “H” means hydrogen.

[0113] The term “haloalkyl” as used herein, means at least one halogen, as defined herein, appended to the parent molecular moiety through an alkyl group, as defined herein. Representative examples of haloalkyl include, but are not limited to, chloromethyl, 2-fluoroethyl, trifluoromethyl, pentafluoroethyl, and 2-chloro-3-fluoropentyl.

[0114] The term “heteroaryl,” as used herein, means a monocyclic heteroaryl or a bicyclic ring system containing at least one heteroaromatic ring (i.e., a monocyclic or bicyclic aromatic ring system containing at least one heteroatom within the aromatic system). The monocyclic heteroaryl can be a 5 or 6 membered ring. The 5 membered ring consists of two double bonds and one, two, three or four nitrogen atoms and optionally one oxygen or sulfur atom. The 6 membered ring consists of three double bonds and one, two, three or four nitrogen atoms. The 5 or 6 membered heteroaryl is connected to the parent molecular moiety through any carbon atom or any nitrogen atom contained within the heteroaryl. Representative examples of monocyclic heteroaryl include, but are not limited to, furyl, imidazolyl, isoxazolyl, isothiazolyl, oxadiazolyl, oxazolyl, pyridinyl, pyridazinyl, pyrimidinyl, pyrazinyl, pyrazolyl, pyrrolyl, tetrazolyl, thiadiazolyl, thiazolyl, thienyl, triazolyl, and triazinyl. The bicyclic heteroaryl consists of a monocyclic heteroaryl fused to a phenyl, a monocyclic cycloalkyl, a monocyclic cycloalkenyl, a monocyclic heterocyclyl, or a monocyclic heteroaryl. The fused cycloalkyl or heterocyclyl portion of the bicyclic heteroaryl group is optionally substituted with one or two groups which are independently oxo or thia. Representative examples of bicyclic heteroaryl include, but are not limited to, benzimidazolyl, benzofuranyl, benzothienyl, benzoxadiazolyl, benzoxathiadiazolyl, benzothiazolyl, cinnolinyl, 5,6-dihydroquinolin-2-yl, 5,6-dihydroquinolin-8-yl, 5,6-dihydroisoquinolin-1-yl, furopyridinyl, indazolyl, indolyl, isoquinolinyl, naphthyridinyl, quinolinyl, purinyl, 5,6,7,8-tetrahydroquinolin-2-yl, 5,6,7,8-tetrahydroquinolin-3-yl, 5,6,7,8-tetrahydroquinolin-4-yl, 5,6,7,8-tetrahydroquinolin-5-yl, 5,6,7,8-tetrahydroquinolin-6-yl, 5,6,7,8-tetrahydroquinolin-7-yl, 5,6,7,8-tetrahydroquinolin-8-yl, 5,6,7,8-tetrahydroisoquinolin-1-yl, thienopyridinyl, 4,5,6,7-tetrahydrobenzo[c][1,2,5]oxadiazol-4-yl, and 6,7-dihydrobenzo[c][1,2,5]oxadiazol-4(5H)-onyl. In certain embodiments, the fused bicyclic heteroaryl is a 5 or 6 membered monocyclic heteroaryl ring fused to either a phenyl ring, a 5 or 6 membered monocyclic cycloalkyl, a 5 or 6 membered monocyclic cycloalkenyl, a 5 or 6 membered monocyclic heterocyclyl, or a 5 or 6 membered monocyclic heteroaryl, wherein the fused cycloalkyl, cycloalkenyl, and heterocyclyl groups are optionally substituted with one or two groups which are independently oxo or thia.

[0115] The term “heteroarylalkyl” and “-alkylheteroaryl” as used herein, means a heteroaryl, as defined herein, appended to the parent molecular moiety through an alkyl group, as defined herein.

[0116] Representative examples of heteroarylalkyl include, but are not limited to, fur-3-ylmethyl, 1H-imidazol-2-ylmethyl, 1H-imidazol-4-ylmethyl, 1-(pyridin-4-yl)ethyl, pyridin-3-ylmethyl, pyridin-4-ylmethyl, pyrimidin-5-ylmethyl, 2-(pyrimidin-2-yl)propyl, thien-2-ylmethyl, and thien-3-ylmethyl.

[0117] The term “heterocyclyl” as used herein, means a monocyclic heterocycle or a bicyclic heterocycle. The monocyclic heterocycle is a 3, 4, 5, 6, or 7 membered ring containing at least one heteroatom independently selected from the group consisting of O, N, and S where the ring is saturated or unsaturated, but not aromatic. The 3 or 4 membered ring contains 1 heteroatom selected from the group consisting of O, N and S. The 5 membered ring can contain zero or one double bond and one, two or three heteroatoms selected from the group consisting of O, N and S. The 6 or 7 membered ring contains zero, one, or two double bonds and one, two or three heteroatoms selected from the group consisting of O, N and S. Representative examples of monocyclic heterocycles include, but are not limited to, azetidinyl, azepanyl, aziridinyl, diazepanyl, 1,3-dioxan-2-yl, 1,3-dioxolan-2-yl, 1,3-dithiolan-2-yl, 1,2-dithiolan-3-yl, 1,2-dithiolan-4-yl, 1,3-dithian-2-yl, 1,2-dithian-3-yl, 1,2-dithian-4-yl, imidazolinyl, imidazolidinyl, isothiazolinyl, isothiazolidinyl, isoxazolinyl, isoxazolidinyl, morpholinyl, oxadiazolinyl, oxadiazolidinyl, oxazolinyl, oxazolidinyl, piperazinyl, piperidinyl, pyranyl, pyrazolinyl, pyrazolidinyl, pyrrolinyl, pyrrolidinyl, tetrahydrofuranyl, tetrahydrothienyl, thiadiazolinyl, thiadiazolidinyl, thiazolinyl, thiazolidinyl, thiomorpholinyl, 1,1-dioxidothiomorpholinyl (thiomorpholine sulfone), thiopyranyl, and trithianyl. The bicyclic heterocycle is a monocyclic heterocycle fused to either a monocyclic cycloalkyl, a monocyclic cycloalkenyl, or a monocyclic heterocycle. Representative examples of bicyclic heterocyclyls include, but are not limited to, decahydroquinolinyl, decahydroisoquinolinyl, octahydro-1H-indolyl, and octahydrobenzofuranyl. Heterocyclyl groups are optionally substituted with one or two groups which are independently oxo or thia. In certain embodiments, the bicyclic heterocyclyl is a 5 or 6 membered monocyclic heterocyclyl ring fused to a 5 or 6 membered monocyclic cycloalkyl, a 5 or 6 membered monocyclic cycloalkenyl, or a 5 or 6 membered monocyclic heterocyclyl, wherein the bicyclic heterocyclyl is optionally substituted by one or two groups which are independently oxo or thia.

[0118] The term “hydroxy” or “hydroxyl” as used herein means an —OH group. The term “thiol” as used herein means an —SH group.

[0119] The term “nitro” as used herein means a —NO₂ group.

[0120] The term “oxo” as used herein means a ═O group.

[0121] The term “saturated” as used herein means the referenced chemical structure does not contain any multiple carbon-carbon bonds. For example, a saturated cycloalkyl group as defined herein includes cyclohexyl, cyclopropyl, and the like.

[0122] The term “thia” as used herein means a ═S group.

[0123] The term “amine” or “amino” encompasses compounds where a nitrogen atom is covalently bonded to at least one carbon or heteroatom. The term “alkyl amino” includes groups and compounds wherein the nitrogen is bound to at least one additional alkyl group. The term “dialkyl amino” includes groups wherein the nitrogen atom is bound to at least two additional alkyl groups.

[0124] The term “unsaturated” as used herein means the referenced chemical structure contains at least one multiple carbon-carbon bond (i.e., double or triple bond, or both), but is not aromatic. For example, an unsaturated cycloalkyl group as defined herein includes cyclohexenyl, cyclopentenyl, cyclohexadienyl, and the like.

[0125] The term “leaving group” as used herein means an atom or group (charged or uncharged) that becomes detached from an atom in what is considered to be the residual or main part of the substrate in a specified reaction. For example, the specified reaction herein, unless otherwise noted, is an S_{N}1 or an S_{N}2 reaction as is understood by one skilled in the art. In certain embodiments, the specified reaction herein, is an S_{N}2 reaction.

[0126] The term“substituted” as used herein, whether preceded by the term“optionally” or not, means that at least one hydrogen present on a group (e.g., a carbon or nitrogen atom) is replaced with a permissible substituent, e.g., a substituent which upon substitution results in a stable compound, e.g., a compound which does not spontaneously undergo transformation such as by rearrangement, cyclization, elimination, or other reaction. Unless otherwise indicated, a“substituted” group has a substituent at one or more substitutable positions of the group, and when more than one position in any given structure is substituted, the substituent is either the same or different at each position. Suitable substituents include, but are not limited to, halogen, hydroxy, thiol, nitro, alkoxy, azido, carboxy, cyano, amino, C₁₋₆alkyl, C₂₋₆alkenyl, C₁₋₆alkoxy, C₁₋₆alkylamino. The term “support linking group as used herein means a divalent chemical moiety that covalent connects a surface-bound functional group of a solid support (e.g., an amino group of an amino-modified solid support) to another chemical moiety.

[0127] The term “reactive pair” as used herein means two functional groups known by one skilled in the art to be capable of reacting, alone or in the presence of other reagents, to form a covalent linkage between the two chemical entities which each contain one of member of the reactive pair, respectively; the latter, herein, is referred to as “linking group formed by a reactive pair”. In some embodiments, a reactive pair is a click pair, i.e., two functional groups capable of reacting in a click reaction to form a covalent linkage.

[0128] The term “Michael acceptor” as used herein means an alpha, beta-unsaturated compound capable of reacting with a nucleophile at the beta-carbon of the electrophilic alkene of the alpha, beta-unsaturated compound. Examples of alpha, beta-unsaturated compound include, but are not limited to, such as an alpha, beta-unsaturated aldehyde, ester, amide, sulfonyl, ketone, nitrile, or nitro. “Alpha, beta-unsaturated” refers to the carbon-carbon multiple bond that connects the carbon atom that is immediately adjacent to the referenced aldehyde, ester, amide, sulfonyl, ketone, nitrile, or nitro group, to its adjacent carbon atom. Examples of Michael acceptor group include, but are not limited to, N-maleimide, acrylaldehyde, acrylonitrile, acrylic acid, acrylamide (e.g., N-isoproprylacrylamide), acrylate esters (e.g., methyl acrylate), vinyl sulfones, vinylsulfonates, and vinylsulfonamides.

[0129] The term “hydroxyl protecting group” or “hydroxyl protecting group” as used herein means those functional groups that are well known in the art and include those described in detail, for example, in Protecting Groups in Organic Synthesis, T. W. Greene and P. G. M. Wuts, 3rd edition, John Wiley & Sons, 1999, the entirety of which is incorporated herein by reference. Suitable hydroxyl protecting groups include but are not limited to, acetyl, trifluoroacetyl, trichloroacetyl, pivaloyl, t-butyl, allyl, optionally substituted benzyl (such as benzyl, 2-nitrobenzyl, 4-nitrobenzyl, 2,6-dichlorobenzyl, 4-chlorobenzyl, 4-fluorobenzyl, 4-bromobenzyl, 4-methoxybenzyl, 3,4-dimethoxybenzyl, 2-cyanobenzyl, 4-cyanobenzyl, 4-phenylbenzyl), 2-picolyl, 4-picolyl, methoxymethyl (MOM), methylthiomethyl (MTM), ethoxymethyl, 2-methoxyethoxymethyl (MEM), 2,2,2-trichloroethoxymethyl, t-butoxymethyl, benzyloxymethyl (BOM), 4-methoxybenzyloxymethyl (Mbom), (phenyldimethylsilyl)methoxymethyl (SMOM), 2-(Trimethylsilyl)ethoxymethyl (SEM), t-butylthiomethyl, 2-tetrahydropyranyl (THP), 4-methoxytetrahydropyran-2-yl (MTHP), 4-methoxytetrahydrothiopyran-2-yl, 3-bromotetrahydropyran-2-yl, 2-tetrahydrothiopyranyl, trimethylsilyl (TMS), triethylsilyl (TES), triisopropylsilyl (TIPS), t-butyldimethylsilyl (TBDMS), t-butyldiphenylsilyl (TBDPS), Isopropyldimethylsilyl (IPDMS), diethylisopropylsilyl (DEIPS), diphenylmethyl, 9-phenylxanthine-9-yl (Pixyl), 9-(p-methoxyphenyl)xanthine-9-yl (MOX), and optionally substituted trityl (e.g., trityl (Trt), 2-chlorotrityl (Clt), 4-methoxytrityl (Mint), 4-methyltrityl (Mtt), 4,4′-dimethoxytrityl (DMT)), and 4,4′,4″-trimethoxytrityl.

[0130] The term “nitrogen protecting group” as used herein means those functional groups that are well known in the art and include those described in detail, for example, in Protecting Groups in Organic Synthesis, T. W. Greene and P. G. M. Wuts, 3rd edition, John Wiley & Sons, 1999, the entirety of which is incorporated herein by reference. Suitable nitrogen protecting groups include but are not limited to, allyl (Alloc), acetyl (Ac), Adpoc (1-(1-Adamantyl)-1-methylethoxycarbonyl), Boc (tert-butyloxy carbonyl), Dde

[chemical structure]

Dnp (2,4-dinitrophenyl), Mint (4-methoxytrityl), Mtt (4-methyltrityl), Teoc (2-trimethylsilylethoxycarbonyl, Tfa (trifluoroacetyl), optionally substituted trityl (e.g., trityl (Trt), 2-chlorotrityl (Clt), 4-methoxytrityl (Mmt), 4-methyltrityl (Mtt), 4,4′-dimethoxytrityl (DMT)), and 4,4′,4″-trimethoxytrityl), optionally substituted benzyloxycarbonyl (e.g., benzyloxycarbonyl (Z) or 2-chlorobenzyloxycarbonyl (2ClZ)), fluorenylmethoxycarbonyl (Fmoc), methoxyacetyl (mac), phenoxyacetyl (pac), 2-chlorophenoxyacetyl, 3-chlorophenoxyacetyl, 4-chlorophenoxyacetyl, 2,4-dichlorophenoxyacetyl, 2-methylphenoxyacetyl, 3-methylphenoxyacetyl, 4-methylphenoxyacetyl, 4-chloro-2-methylphenoxyacetyl, 2-nitrophenoxyacetyl, 3-nitrophenoxyacetyl, 4-nitrophenoxyacetyl, 2-isopropylphenoxyacetyl, 3-isopropylphenoxyacetyl, 4-isopropylphenoxyacetyl, 2-(t-butyl)phenoxyacetyl, 3-(t-butyl)phenoxyacetyl, 4-(t-butyl)phenoxyacetyl, 2-fluorophenoxyacetyl, 3-fluorophenoxyacetyl, 4-fluorophenoxyacetyl, 2,4-difluorophenoxyacetyl, 4-(trifluoromethoxy)phenoxyacetyl, 2-phenoxypropanoyl, 2-(4-chloro-2-methylphenoxy)propanoyl, and 2-(4-chlorophenoxy)propanoyl.

[0131] The term “phosphorous coupling group” as used herein means a H-phosphonate or phosphoroamidite that is reactive with hydroxyl groups and can form a phosphite triester or thiophosphate triester when used within a process for making internucleotide linkages, such as phosphodiester or phosphorothioate linkages.

[0132] The term “solid support as used herein refers to any form of a polymer or composite material that does not completely dissolve in a solvent. By way of example only, a solid support includes colloids (isolated or in suspension), gels, resins, films, as well as any other form of a polymer or composite materials that retains a distinct identity apart from the solvent. The term is not meant to limit in any manner the size, shape, form, or chemical structure of the polymeric or composite material. Such polymeric or composite materials are well known in the art, including, by way of example only, cellulose, pore-glass, silica, polystyrene, polystyrene cross-linked with divinylbenzene, polyacrylamide, latex, dimethylacrylamide, dimethylacrylamide cross-linked with N,N′-bis-acryloyl ethylene diamine, glass, glass coated with a hydrophobic polymer, composites, or any other material conventionally used in solid phase organic synthesis. In addition, the term solid support is not limited by the presence and nature of cross-linking groups, and by the nature of the exposed functional groups. Exposed functional groups are moieties on the solid support that can react with a guest molecule to form support-bound guest molecules; preferred exposed functional groups include —OH, —SH, —NH₂, silyloxy, alkylamino, NH₂NH, COOH, ester, aldehyde, —Br, —I, halomethyl (e.g., bromomethyl), and alkenyl. Furthermore, the exposed functional groups can be located on the surface of the solid support or dispersed throughout the solid support. In one embodiment, the solid support has a rigid or semi-rigid surface. Particular examples of solid supports include amino-terminated Controlled Pore Glass (CPG), such as long chain alkylamine CPG (LCAA-CPG), and amino-terminated or hydroxy-terminate cross-linked polystyrene, such as NittoPhase™ solid support (about 420 mol/g hydroxy groups), NittoPhase® HL solid support (about 550 mol/g hydroxy groups), and NittoPhase® UnyLinker™ solid support, each available from Kinovate Life Sciences (Oceanside, CA).

[0133] The term “activated ester” as used herein refers to those derivatives of a carboxyl group that are more susceptible to displacement by nucleophilic addition and elimination than an ethyl ester group (e.g., an NHS ester, a sulfo-NHS ester, a PAM ester, or a halophenyl ester). Representative carbonyl substituents of activated esters include succinimidyloxy, sulfosuccinimidyloxy, -1-oxybenzotriazolyl; 4-sulfo-2,3,5,6-tetrafluorophenyl; or an aryloxy group that is optionally substituted one or more times by electron-withdrawing substituents such as nitro, fluoro, chloro, cyano, trifluoromethyl, or combinations thereof (e.g., pentafluorophenyloxy). In certain embodiments, activated esters include succinimidyloxy and sulfosuccinimidyloxy esters.

[0134] As used herein, “target sequence” or “target nucleic acid” refers to a contiguous portion of the nucleotide sequence of an mRNA molecule formed during the transcription of a target gene, including mRNA that is a product of RNA processing of a primary transcription product. In one embodiment, the target portion of the sequence will be at least long enough to serve as a substrate for RNAi-directed cleavage at or near that portion of the nucleotide sequence of an mRNA molecule formed during the transcription of a target gene. In one embodiment, the target sequence is within the protein coding region of the target gene. In another embodiment, the target sequence is within the 3′ UTR of the target gene. The target nucleic acid can be a cellular gene (or mRNA transcribed from the gene) whose expression is associated with a particular disorder or disease state.

[0135] The target sequence may be from about 9-36 nucleotides in length, e.g., about 15-30 nucleotides in length. For example, the target sequence can be about 15-30 nucleotides, 15-29, 15-28, 15-27, 15-26, 15-25, 15-24, 15-23, 15-22, 15-21, 15-20, 15-19, 15-18, 15-17, 18-30, 18-29, 18-28, 18-27, 18-26, 18-25, 18-24, 18-23, 18-22, 18-21, 18-20, 19-30, 19-29, 19-28, 19-27, 19-26, 19-25, 19-24, 19-23, 19-22, 19-21, 19-20, 20-30, 20-29, 20-28, 20-27, 20-26, 20-25, 20-24, 20-23, 20-22, 20-21, 21-30, 21-29, 21-28, 21-27, 21-26, 21-25, 21-24, 21-23, or 21-22 nucleotides in length. In some embodiments, the target sequence is about 19 to about 30 nucleotides in length. In other embodiments, the target sequence is about 19 to about 25 nucleotides in length. In still other embodiments, the target sequence is about 19 to about 23 nucleotides in length. In some embodiments, the target sequence is about 21 to about 23 nucleotides in length. Ranges and lengths intermediate to the above recited ranges and lengths are also contemplated to be part of the invention.

[0136] As used herein, the term “strand comprising a sequence” refers to an oligonucleotide comprising a chain of nucleotides that is described by the sequence referred to using the standard nucleotide nomenclature.

[0137] “G,” “C,” “A,” “T,” and “U” each generally stand for a nucleotide that contains guanine, cytosine, adenine, thymidine, and uracil as a base, respectively. However, it will be understood that the term “ribonucleotide” or “nucleotide” can also refer to a modified nucleotide, as further detailed below, or a surrogate replacement moiety (see, e.g., Table 1). The skilled person is well aware that guanine, cytosine, adenine, and uracil can be replaced by other moieties without substantially altering the base pairing properties of an oligonucleotide comprising a nucleotide bearing such replacement moiety. It is understood that when a cDNA sequence is provided, the corresponding mRNA or RNAi agent would include a U in place of a T. For example, without limitation, a nucleotide comprising inosine as its base can base pair with nucleotides containing adenine, cytosine, or uracil. Hence, nucleotides containing uracil, guanine, or adenine can be replaced in the nucleotide sequences of dsRNA featured in the invention by a nucleotide containing, for example, inosine. In another example, adenine and cytosine anywhere in the oligonucleotide can be replaced with guanine and uracil, respectively to form G-U Wobble base pairing with the target mRNA. Sequences containing such replacement moieties are suitable for the compositions and methods featured in the invention. Further, one of skill in the art that a T is a target gene sequence, or reverse complement thereof, would often be replaced by a U in an RNAi agent of the invention.

[0138] The terms “iRNA”, “RNAi agent,” “iRNA agent,” “RNA interference agent” as used interchangeably herein, refer to an agent that contains RNA as that term is defined herein, and which mediates the targeted cleavage of an RNA transcript via an RNA-induced silencing complex (RISC) pathway. RNA interference (RNAi) is a process that directs the sequence-specific degradation of mRNA. RNAi modulates, e.g., inhibits, the expression of a target gene in a cell, e.g., a cell within a subject, such as a mammalian subject.

[0139] In one embodiment, an RNAi agent of the disclosure includes a single stranded RNAi that interacts with a target RNA sequence, e.g., a target mRNA sequence, to direct the cleavage of the target RNA. Without wishing to be bound by theory it is believed that long double stranded RNA introduced into cells is broken down into double-stranded short interfering RNAs (siRNAs) comprising a sense strand and an antisense strand by a Type III endonuclease known as Dicer (Sharp et al. (2001) Genes Dev. 15:485). Dicer, a ribonuclease-III-like enzyme, processes these dsRNA into 19-23 base pair short interfering RNAs with characteristic two base 3′ overhangs (Bernstein, et al., (2001) Nature 409:363). These siRNAs are then incorporated into an RNA-induced silencing complex (RISC) where one or more helicases unwind the siRNA duplex, enabling the complementary antisense strand to guide target recognition (Nykanen, et al., (2001) Cell 107:309). Upon binding to the appropriate target mRNA, one or more endonucleases within the RISC cleave the target to induce silencing (Elbashir, et al., (2001) Genes Dev. 15:188). Thus, in one aspect the disclosure relates to a single stranded RNA (ssRNA) (the antisense strand of a siRNA duplex) generated within a cell and which promotes the formation of a RISC complex to effect silencing of the target gene. Accordingly, the term “siRNA” is also used herein to refer to an RNAi as described above.

[0140] In another embodiment, the RNAi agent may be a single-stranded RNA that is introduced into a cell or organism to inhibit a target mRNA. Single-stranded RNAi agents bind to the RISC endonuclease, Argonaute 2, which then cleaves the target mRNA. The single-stranded siRNAs are generally 15-30 nucleotides and are chemically modified. The design and testing of single-stranded RNAs are described in U.S. Pat. No. 8,101,348 and in Lima et al., (2012) Cell 150:883-894, the entire contents of each of which are hereby incorporated herein by reference. Any of the antisense nucleotide sequences described herein may be used as a single-stranded siRNA as described herein or as chemically modified by the methods described in Lima et al., (2012) Cell 150:883-894.

[0141] In another embodiment, an “RNAi agent” for use in the compositions and methods of the disclosure is a double stranded RNA and is referred to herein as a “double stranded RNAi agent,” “double stranded RNA (dsRNA) molecule,” “dsRNA agent,” or “dsRNA”. The term “dsRNA” refers to a complex of ribonucleic acid molecules, having a duplex structure comprising two anti-parallel and substantially complementary nucleic acid strands, referred to as having “sense” and “antisense” orientations with respect to a target RNA, i.e., a target mRNA sequence. In some embodiments of the disclosure, a double stranded RNA (dsRNA) triggers the degradation of a target RNA, e.g., an mRNA, through a post-transcriptional gene-silencing mechanism referred to herein as RNA interference or RNAi.

[0142] In general, a dsRNA molecule can include ribonucleotides, but as described in detail herein, each or both strands can also include one or more non-ribonucleotides, e.g., a deoxyribonucleotide, a modified nucleotide. In addition, as used in this specification, an “RNAi agent” may include ribonucleotides with chemical modifications; an RNAi agent may include substantial modifications at multiple nucleotides.

[0143] As used herein, the term “modified nucleotide” refers to a nucleotide having, independently, a modified sugar moiety, a modified internucleotide linkage, or a modified nucleobase. Thus, the term modified nucleotide encompasses substitutions, additions or removal of, e.g., a functional group or atom, to internucleoside linkages, sugar moieties, or nucleobases. The modifications suitable for use in the agents of the disclosure include all types of modifications disclosed herein or known in the art. Any such modifications, as used in a siRNA type molecule, are encompassed by “RNAi agent” for the purposes of this specification and claims.

[0144] In certain embodiments of the instant disclosure, inclusion of a deoxy-nucleotide—which is acknowledged as a naturally occurring form of nucleotide—if present within a RNAi agent can be considered to constitute a modified nucleotide.

[0145] The duplex region may be of any length that permits specific degradation of a desired target RNA through a RISC pathway, and may range from about 9 to 36 base pairs in length, e.g., about 15-30 base pairs in length, for example, about 9, 10, 11, 12, 13, 14, 15, 16, 17, 18, 19, 20, 21, 22, 23, 24, 25, 26, 27, 28, 29, 30, 31, 32, 33, 34, 35, or 36 base pairs in length, such as about 15-30, 15-29, 15-28, 15-27, 15-26, 15-25, 15-24, 15-23, 15-22, 15-21, 15-20, 15-19, 15-18, 15-17, 18-30, 18-29, 18-28, 18-27, 18-26, 18-25, 18-24, 18-23, 18-22, 18-21, 18-20, 19-30, 19-29, 19-28, 19-27, 19-26, 19-25, 19-24, 19-23, 19-22, 19-21, 19-20, 20-30, 20-29, 20-28, 20-27, 20-26, 20-25, 20-24, 20-23, 20-22, 20-21, 21-30, 21-29, 21-28, 21-27, 21-26, 21-25, 21-24, 21-23, or 21-22 base pairs in length. Ranges and lengths intermediate to the above recited ranges and lengths are also contemplated to be part of the invention.

[0146] The two strands forming the duplex structure may be different portions of one larger RNA molecule, or they may be separate RNA molecules. Where the two strands are part of one larger molecule, and therefore are connected by an uninterrupted chain of nucleotides between the 3′-end of one strand and the 5′-end of the respective other strand forming the duplex structure, the connecting RNA chain is referred to as a “hairpin loop.” A hairpin loop can comprise at least one unpaired nucleotide. In some embodiments, the hairpin loop can comprise at at least 4, at least 5, at least 6, at least 7, at least 8, at least 9, at least 10, at least 20, at least 23 or more unpaired nucleotides or nucleotides not directed to the target site of the dsRNA. In some embodiments, the hairpin loop can be 10 or fewer nucleotides. In some embodiments, the hairpin loop can be 8 or fewer unpaired nucleotides. In some embodiments, the hairpin loop can be 4-10 unpaired nucleotides. In some embodiments, the hairpin loop can be 4-8 nucleotides.

[0147] In certain embodiment, the two strands of double-stranded oligomeric compound can be linked together. The two strands can be linked to each other at both ends, or at one end only. By linking at one end is meant that 5′-end of first strand is linked to the 3′-end of the second strand or 3′-end of first strand is linked to 5′-end of the second strand. When the two strands are linked to each other at both ends, 5′-end of first strand is linked to 3′-end of second strand and 3′-end of first strand is linked to 5′-end of second strand. The two strands can be linked together by an oligonucleotide linker including, but not limited to, (N)n; wherein N is independently a modified or unmodified nucleotide and n is 3-23. In some embodiments, n is 3-10, e.g., 3, 4, 5, 6, 7, 8, 9, or 10. In some embodiments, the oligonucleotide linker is selected from the group consisting of GNRA, (G)4, (U)4, and (dT)4, wherein N is a modified or unmodified nucleotide and R is a modified or unmodified purine nucleotide. Some of the nucleotides in the linker can be involved in base-pair interactions with other nucleotides in the linker. The two strands can also be linked together by a non-nucleosidic linker, e.g. a linker described herein. It will be appreciated by one of skill in the art that any oligonucleotide chemical modifications or variations describe herein can be used in the oligonucleotide linker.

[0148] Hairpin and dumbbell type oligomeric compounds will have a duplex region equal to or at least 14, 15, 15, 16, 17, 18, 19, 29, 21, 22, 23, 24, or 25 nucleotide pairs. The duplex region can be equal to or less than 200, 100, or 50, in length. In some embodiments, ranges for the duplex region are 15-30, 17 to 23, 19 to 23, and 19 to 21 nucleotides pairs in length.

[0149] The hairpin oligomeric compounds can have a single strand overhang or terminal unpaired region, in some embodiments at the 3′, and in some embodiments on the antisense side of the hairpin. In some embodiments, the overhangs are 1-4, more generally 2-3 nucleotides in length. The hairpin oligomeric compounds that can induce RNA interference are also referred to as “shRNA” herein.

[0150] Where the two substantially complementary strands of a dsRNA are comprised by separate RNA molecules, those molecules need not, but can be covalently connected. Where the two strands are connected covalently by means other than an uninterrupted chain of nucleotides between the 3′-end of one strand and the 5′-end of the respective other strand forming the duplex structure, the connecting structure is referred to as a “linker.” The RNA strands may have the same or a different number of nucleotides. The maximum number of base pairs is the number of nucleotides in the shortest strand of the dsRNA minus any overhangs that are present in the duplex. In addition to the duplex structure, an RNAi may comprise one or more nucleotide overhangs.

[0151] In one embodiment, an RNAi agent of the invention is a dsRNA, each strand of which is 24-30 nucleotides in length, that interacts with a target RNA sequence, e.g., a target mRNA sequence, to direct the cleavage of the target RNA. Without wishing to be bound by theory, long double stranded RNA introduced into cells is broken down into siRNA by a Type III endonuclease known as Dicer (Sharp et al. (2001) Genes Dev. 15:485). Dicer, a ribonuclease-III-like enzyme, processes the dsRNA into 19-23 base pair short interfering RNAs with characteristic two base 3′ overhangs (Bernstein, et al., (2001) Nature 409:363). The siRNAs are then incorporated into an RNA-induced silencing complex (RISC) where one or more helicases unwind the siRNA duplex, enabling the complementary antisense strand to guide target recognition (Nykanen, et al., (2001) Cell 107:309). Upon binding to the appropriate target mRNA, one or more endonucleases within the RISC cleave the target to induce silencing (Elbashir, et al., (2001) Genes Dev. 15:188).

[0152] In one embodiment, an RNAi agent of the invention is a dsRNA agent, each strand of which comprises 19-23 nucleotides that interacts with a target mRNA sequence to direct the cleavage of the target RNA. Without wishing to be bound by theory, long double stranded RNA introduced into cells is broken down into siRNA by a Type III endonuclease known as Dicer (Sharp et al. (2001) Genes Dev. 15:485). Dicer, a ribonuclease-III-like enzyme, processes the dsRNA into 19-23 base pair short interfering RNAs with characteristic two base 3′ overhangs (Bernstein, et al., (2001) Nature 409:363). The siRNAs are then incorporated into an RNA-induced silencing complex (RISC) where one or more helicases unwind the siRNA duplex, enabling the complementary antisense strand to guide target recognition (Nykanen, et al., (2001) Cell 107:309). Upon binding to the appropriate target mRNA, one or more endonucleases within the RISC cleave the target to induce silencing (Elbashir, et al., (2001) Genes Dev. 15:188). In one embodiment, an RNAi agent of the invention is a dsRNA of 24-30 nucleotides that interacts with a target mRNA sequence to direct the cleavage of the target RNA.

[0153] As used herein, the term “nucleotide overhang” refers to at least one unpaired nucleotide that protrudes from the duplex structure of a RNAi agent, e.g., a dsRNA. For example, when a 3′-end of one strand of a dsRNA extends beyond the 5′-end of the other strand, or vice versa, there is a nucleotide overhang. A dsRNA can comprise an overhang of at least one nucleotide; alternatively, the overhang can comprise at least two nucleotides, at least three nucleotides, at least four nucleotides, at least five nucleotides or more. A nucleotide overhang can comprise or consist of a nucleotide/nucleoside analog, including a deoxynucleotide/nucleoside. The overhang(s) can be on the sense strand, the antisense strand or any combination thereof. Furthermore, the nucleotide(s) of an overhang can be present on the 5′-end, 3′-end or both ends of either an antisense or sense strand of a dsRNA.

[0154] In one embodiment of the dsRNA, at least one strand comprises a 3′ overhang of at least 1 nucleotide. In another embodiment, at least one strand comprises a 3′ overhang of at least 2 nucleotides, e.g., 2, 3, 4, 5, 6, 7, 9, 10, 11, 12, 13, 14, or 15 nucleotides. In other embodiments, at least one strand of the RNAi agent comprises a 5′ overhang of at least 1 nucleotide. In certain embodiments, at least one strand comprises a 5′ overhang of at least 2 nucleotides, e.g., 2, 3, 4, 5, 6, 7, 9, 10, 11, 12, 13, 14, or 15 nucleotides. In still other embodiments, both the 3′ and the 5′ end of one strand of the RNAi agent comprise an overhang of at least 1 nucleotide.

[0155] In one embodiment, the antisense strand of a dsRNA has a 1-10 nucleotide, e.g., 0-3, 1-3, 2-4, 2-5, 4-10, 5-10, e.g., a 1, 2, 3, 4, 5, 6, 7, 8, 9, or 10 nucleotide, overhang at the 3′-end or the 5′-end. In one embodiment, the sense strand of a dsRNA has a 1-10 nucleotide, e.g., a 1, 2, 3, 4, 5, 6, 7, 8, 9, or 10 nucleotide, overhang at the 3′-end or the 5′-end. In another embodiment, one or more of the nucleotides in the overhang is replaced with a nucleoside thiophosphate.

[0156] In certain embodiments, the overhang on the sense strand or the antisense strand, or both, can include extended lengths longer than 10 nucleotides, e.g., 1-30 nucleotides, 2-30 nucleotides, 10-30 nucleotides, or 10-15 nucleotides in length. In certain embodiments, an extended overhang is on the sense strand of the duplex. In certain embodiments, an extended overhang is present on the 3′ end of the sense strand of the duplex. In certain embodiments, an extended overhang is present on the 5′ end of the sense strand of the duplex. In certain embodiments, an extended overhang is on the antisense strand of the duplex. In certain embodiments, an extended overhang is present on the 3′ end of the antisense strand of the duplex. In certain embodiments, an extended overhang is present on the 5′ end of the antisense strand of the duplex. In certain embodiments, one or more of the nucleotides in the overhang is replaced with a nucleoside thiophosphate. In certain embodiments, the overhang includes a self-complementary portion such that the overhang is capable of forming a hairpin structure that is stable under physiological conditions.

[0157] The terms “blunt” or “blunt ended”, as used herein in reference to a dsRNA, mean that there are no unpaired nucleotides or nucleotide analogs at a given terminal end of a dsRNA, i.e., no nucleotide overhang. One or both ends of a dsRNA can be blunt. Where both ends of a dsRNA are blunt, the dsRNA is said to be blunt ended. To be clear, a “blunt ended” dsRNA is a dsRNA that is blunt at both ends, i.e., no nucleotide overhang at either end of the molecule. Most often such a molecule will be double stranded over its entire length.

[0158] The term “antisense strand” or “guide strand” refers to the strand of an iRNA, e.g., a dsRNA, which includes a region that is substantially complementary to a target sequence, e.g., a target mRNA sequence.

[0159] As used herein, the term “region of complementarity” refers to the region on the antisense strand that is substantially complementary to a sequence, for example a target sequence, e.g., a target nucleotide sequence, as defined herein. Where the region of complementarity is not fully complementary to the target sequence, the mismatches can be in the internal or terminal regions of the molecule. Generally, the most tolerated mismatches are in the terminal regions, e.g., within 5, 4, 3, or 2 nucleotides of the 5′- or 3′-terminus of the RNAi agent.

[0160] In some embodiments, a double stranded RNA agent of the invention includes a nucleotide mismatch in the antisense strand. In some embodiments, the antisense strand of the double stranded RNA agent of the invention includes no more than 4 mismatches with the target mRNA, e.g., the antisense strand includes 4, 3, 2, 1, or 0 mismatches with the target mRNA. In some embodiments, the antisense strand double stranded RNA agent of the invention includes no more than 4 mismatches with the sense strand, e.g., the antisense strand includes 4, 3, 2, 1, or 0 mismatches with the sense strand. In some embodiments, a double stranded RNA agent of the invention includes a nucleotide mismatch in the sense strand. In some embodiments, the sense strand of the double stranded RNA agent of the invention includes no more than 4 mismatches with the antisense strand, e.g., the sense strand includes 4, 3, 2, 1, or 0 mismatches with the antisense strand. In some embodiments, the nucleotide mismatch is, for example, within 5, 4, 3 nucleotides from the 3′-end of the iRNA. In another embodiment, the nucleotide mismatch is, for example, in the 3′-terminal nucleotide of the iRNA agent. In some embodiments, the mismatch(s) is not in the seed region.

[0161] Thus, an RNAi agent as described herein can contain one or more mismatches to the target sequence. In one embodiment, a RNAi agent as described herein contains no more than 3 mismatches (i.e., 3, 2, 1, or 0 mismatches). In one embodiment, an RNAi agent as described herein contains no more than 2 mismatches. In one embodiment, an RNAi agent as described herein contains no more than 1 mismatch. In one embodiment, an RNAi agent as described herein contains 0 mismatches. In certain embodiments, if the antisense strand of the RNAi agent contains mismatches to the target sequence, the mismatch can optionally be restricted to be within the last 5 nucleotides from either the 5′- or 3′-end of the region of complementarity. For example, in such embodiments, for a 23 nucleotide RNAi agent, the strand which is complementary to a region of a target gene, generally does not contain any mismatch within the central 13 nucleotides. The methods described herein or methods known in the art can be used to determine whether an RNAi agent containing a mismatch to a target sequence is effective in inhibiting the expression of a target gene. Consideration of the efficacy of RNAi agents with mismatches in inhibiting expression of a target gene is important, especially if the particular region of complementarity in a target gene is known to vary.

[0162] The term “sense strand” or “passenger strand” as used herein, refers to the strand of a RNAi agent that includes a region that is substantially complementary to a region of the antisense strand as that term is defined herein.

[0163] As used herein, “substantially all of the nucleotides are modified” are largely but not wholly modified and can include not more than 5, 4, 3, 2, or 1 unmodified nucleotides.

[0164] As used herein, the term “cleavage region” refers to a region that is located immediately adjacent to the cleavage site. The cleavage site is the site on the target at which cleavage occurs. In some embodiments, the cleavage region comprises three bases on either end of, and immediately adjacent to, the cleavage site. In some embodiments, the cleavage region comprises two bases on either end of, and immediately adjacent to, the cleavage site. In some embodiments, the cleavage site specifically occurs at the site bound by nucleotides 10 and 11 of the antisense strand, and the cleavage region comprises nucleotides 11, 12 and 13.

[0165] As used herein, and unless otherwise indicated, the term “complementary,” when used to describe a first nucleotide sequence in relation to a second nucleotide sequence, refers to the ability of an oligonucleotide or polynucleotide comprising the first nucleotide sequence to hybridize and form a duplex structure under certain conditions with an oligonucleotide or polynucleotide comprising the second nucleotide sequence, as will be understood by the skilled person. Such conditions can be, for example, “stringent conditions”, where stringent conditions can include: 400 mM NaCl, 40 mM PIPES pH 6.4, 1 mM EDTA, 50° C. or 70° C. for 12-16 hours followed by washing (see, e.g., “Molecular Cloning: A Laboratory Manual, Sambrook, et al. (1989) Cold Spring Harbor Laboratory Press). Other conditions, such as physiologically relevant conditions as can be encountered inside an organism, can apply. The skilled person will be able to determine the set of conditions most appropriate for a test of complementarity of two sequences in accordance with the ultimate application of the hybridized nucleotides.

[0166] Complementary sequences within an RNAi agent, e.g., within a dsRNA as described herein, include base-pairing of the oligonucleotide or polynucleotide comprising a first nucleotide sequence to an oligonucleotide or polynucleotide comprising a second nucleotide sequence over the entire length of one or both nucleotide sequences. Such sequences can be referred to as “fully complementary” with respect to each other herein. However, where a first sequence is referred to as “substantially complementary” with respect to a second sequence herein, the two sequences can be fully complementary, or they can form one or more, but generally not more than 5, 4, 3, or 2 mismatched base pairs upon hybridization for a duplex up to 30 base pairs, while retaining the ability to hybridize under the conditions most relevant to their ultimate application, e.g., inhibition of gene expression, in vitro or in vivo. However, where two oligonucleotides are designed to form, upon hybridization, one or more single stranded overhangs, such overhangs shall not be regarded as mismatches with regard to the determination of complementarity. For example, a dsRNA comprising one oligonucleotide 21 nucleotides in length and another oligonucleotide 23 nucleotides in length, wherein the longer oligonucleotide comprises a sequence of 21 nucleotides that is fully complementary to the shorter oligonucleotide, can yet be referred to as “fully complementary” for the purposes described herein.

[0167] “Complementary” sequences, as used herein, can also include, or be formed entirely from, non-Watson-Crick base pairs or base pairs formed from non-natural and modified nucleotides, in so far as the above requirements with respect to their ability to hybridize are fulfilled. Such non-Watson-Crick base pairs include, but are not limited to, G:U Wobble or Hoogsteen base pairing.

[0168] The terms “complementary,” “fully complementary” and “substantially complementary” herein can be used with respect to the base matching between the sense strand and the antisense strand of a dsRNA, or between two oligonucleotides or polynucleotides, such as the antisense strand of a RNAi agent and a target sequence, as will be understood from the context of their use.

[0169] As used herein, a polynucleotide that is “substantially complementary to at least part of” a messenger RNA (mRNA) or target sequence refers to a polynucleotide that is substantially complementary to a contiguous portion of the mRNA of interest or target sequence (e.g., an mRNA encoding a target gene). For example, a polynucleotide is complementary to at least a part of a target RNA if the sequence is substantially complementary to a non-interrupted portion of an mRNA encoding a target gene.

[0170] Accordingly, in some embodiments, the antisense strand polynucleotides disclosed herein are fully complementary to the target gene sequence. In other embodiments, the antisense polynucleotides disclosed herein are substantially complementary to the target sequence and comprise a contiguous nucleotide sequence which is at least 80% complementary over its entire length to the equivalent region of the nucleotide sequence of the target sequence, such as about 85%, about 90%, about 91%, about 92%, about 93%, about 94%, about 95%, about 96%, about 97%, about 98%, or about 99% complementary.

[0171] Exemplary target genes include, for example, adrenoceptor beta 1 (ADRB1); calcium voltage-gated channel subunit alpha1 C (CACNA1C); calcium voltage-gated channel subunit alpha1 G (CACNA1G) (T type calcium cchannel); angiotensin II receptor type 1 (AGTR1); Sodium Voltage-Gated Channel Alpha Subunit 2 (SCN2A); Hyperpolarization Activated Cyclic Nucleotide Gated Potassium Channel 1 (HCN1); Hyperpolarization Activated Cyclic Nucleotide Gated Potassium Channel 4 (HCN4); Hyperpolarization Activated Cyclic Nucleotide Gated Potassium Channel 3 (HCN3); Potassium Voltage-Gated Channel Subfamily A Member 5 (KCNA5); Potassium Inwardly Rectifying Channel Subfamily J Member 3 (KCNJ3); Potassium Inwardly Rectifying Channel Subfamily J Member 4 (KCNJ4); phospholamban (PLN); calcium/calmodulin dependent protein kinase II delta (CAMK2D); or Phosphodiesterase 1 (PDE1).

[0172] Additional exemplary target genes also include, for example, myostatin (MSTN); Cholinergic Receptor Nicotinic Alpha 1 Subunit (CHRNA1); Cholinergic Receptor Nicotinic Beta 1 Subunit (CHRNB1); Cholinergic Receptor Nicotinic Delta Subunit (CHRND); Cholinergic Receptor Nicotinic Epsilon Subunit (CHRNE); Cholinergic Receptor Nicotinic Gamma Subunit (CHRNG); Collagen Type XIII Alpha 1 Chain (COL13A1); Docking Protein 7 (DOK7); LDL Receptor Related Protein 4 (LRP4); Muscle Associated Receptor Tyrosine Kinase (MUSK); Receptor Associated Protein Of The Synapse (RAPSN); Sodium Voltage-Gated Channel Alpha Subunit 4 (SCN4A); Double Homeobox 4 (DUX4), dystrophy myotonic protein kinase (DMPK), glycogen synthase 1 (GYS1), survival of motor neuron 1 (SMN1), alpha-glucosidase (GAA), advanced glycosylation end-product specific receptor (AGER), mucin 5AC, oligomeric mucus/gel-forming (MUC5AC) and signal transducer and activator of transcription 6 (STAT6).

[0173] As used herein, “adrenoceptor beta 1,” used interchangeably with the term “ADRB1,” refers to a member of the adrenergic receptor family. The adrenergic receptors are a prototypic family of guanine nucleotide binding regulatory protein-coupled receptors that mediate the physiological effects of the hormone epinephrine and the neurotransmitter norepinephrine. Beta-1 adrenoceptors are predominately located in the heart. Specific polymorphisms in this gene have been shown to affect the resting heart rate and can be involved in heart failure. ADRB1 is also known as ADRB1R, beta-1 adrenergic receptor, B1AR, BETA1AR, FNSS2, or RHR.

[0174] An exemplary sequence of a human ADRB1 mRNA transcript can be found at, for example, GenBank Accession No. GI: 1653960731 (NM_000684.3; SEQ ID NO:1; reverse complement, SEQ ID NO: 5). The sequence of mouse ADRB1 mRNA can be found at, for example, GenBank Accession No. GI: 1693744501 (NM_007419.3; SEQ ID NO:2; reverse complement, SEQ ID NO: 6). The sequence of rat ADRB1 mRNA can be found at, for example, GenBank Accession No. GI: 6978458 (NM_012701.1; SEQ ID NO:3; reverse complement, SEQ ID NO: 7). The sequence of Macaca mulatta ADRB1 mRNA can be found at, for example, GenBank Accession No. GI: 577861029 (NM_001289866.1; SEQ ID NO: 4; reverse complement, SEQ ID NO: 8). The sequence of Macaca fascicularis ADRB1 mRNA can be found at, for example, GenBank Accession No. GI: 985482105 (NM_001319353.1; SEQ ID NO: 9; reverse complement, SEQ ID NO: 10).

[0175] Additional examples of ADRB1 mRNA sequences are readily available through publicly available databases, e.g., GenBank, UniProt, OMIM, UCSC Genome Browser, and the Macaca genome project web site.

[0176] Further information on ADRB1 can be found, for example, at www.ncbi.nlm.nih.gov/gene/?term=ADRB1.

[0177] The entire contents of each of the foregoing GenBank Accession numbers and the Gene database numbers are incorporated herein by reference as of the date of filing this application.

[0178] The term ADRB1, as used herein, also refers to variations of the ADRB1 gene including variants provided in the SNP database. Numerous sequence variations within the ADRB1 gene have been identified and may be found at, for example, NCBI dbSNP and UniProt (see, e.g., www.ncbi.nlm.nih.gov/snp/?term=ADRB1, the entire contents of which is incorporated herein by reference as of the date of filing this application.

[0179] In one embodiment, the target gene is calcium voltage-gated channel subunit alpha1 C (CACNA1C).

[0180] As used herein, “calcium voltage-gated channel subunit alpha1 C,” used interchangeably with the term “CACNA1C,” refers to an alpha-1 subunit of a voltage-dependent calcium channel. Calcium channels mediate the influx of calcium ions into the cell upon membrane polarization. The alpha-1 subunit consists of 24 transmembrane segments and forms the pore through which ions pass into the cell. The calcium channel consists of a complex of alpha-1, alpha-2/delta, beta, and gamma subunits in a 1:1:1:1 ratio. There are multiple isoforms of each of these proteins, either encoded by different genes or the result of alternative splicing of transcripts. The protein encoded by this gene binds to and is inhibited by dihydropyridine. CACNA1C is also known as calcium channel, voltage-dependent, L type, alpha 1C subunit; voltage-dependent L-type calcium channel subunit alpha-1C; voltage-gated L-type calcium channel Cav1.2 alpha 1 subunit, splice variant 10; calcium channel, L type, alpha-1 polypeptide, isoform 1, cardiac muscle; calcium channel, cardic dihydropyridine-sensitive, alpha-1 subunit; voltage-dependent L-type Ca2+ channel alpha 1 subunit; voltage-gated calcium channel subunit alpha CaV1.2; DHPR, alpha-1 subunit; CACH2, CACN2, CACNL1A1, CCHL1A1, CaV1.2, LQT8, TS, or TS. LQT8

[0181] An exemplary sequence of a human CACNA1C mRNA transcript can be found at, for example, GenBank Accession No. GI: 1890333913 (NM_199460.4; SEQ ID NO: 11; reverse complement, SEQ ID NO: 12). The sequence of mouse CACNA1C mRNA can be found at, for example, GenBank Accession No. GI: 594140631 (NM_009781.4; SEQ ID NO:13; reverse complement, SEQ ID NO: 14). The sequence of rat CACNA1C mRNA can be found at, for example, GenBank Accession No. GI: 158186632 (NM_012517.2; SEQ ID NO:15; reverse complement, SEQ ID NO: 16). The sequence of Macaca mulatta CACNA1C mRNA can be found at, for example, GenBank Accession No. GI: 1622843324 (XM_028829106.1; SEQ ID NO: 17; reverse complement, SEQ ID NO: 18).

[0182] Additional examples of CACNA1C mRNA sequences are readily available through publicly available databases, e.g., GenBank, UniProt, OMIM, UCSC Genome Browser, and the Macaca genome project website.

[0183] Further information on CACNA1C can be found, for example, at www.ncbi.nlm.nih.gov/gene/?term=CACNA1C.

[0184] The entire contents of each of the foregoing GenBank Accession numbers and the Gene database numbers are incorporated herein by reference as of the date of filing this application.

[0185] The term CACNA1C, as used herein, also refers to variations of the CACNA1C gene including variants provided in the SNP database. Numerous sequence variations within the CACNA1C gene have been identified and may be found at, for example, NCBI dbSNP and UniProt (see, e.g., www.ncbi.nlm.nih.gov/gene/?term=CACNA1C, the entire contents of which is incorporated herein by reference as of the date of filing this application.

[0186] As used herein, “calcium voltage-gated channel subunit alpha1 G,” used interchangeably with the term “CACNA1G,” refers to a T-type, low-voltage activated calcium channel. Voltage-sensitive calcium channels mediate the entry of calcium ions into excitable cells, and are also involved in a variety of calcium-dependent processes, including muscle contraction, hormone or neurotransmitter release, gene expression, cell motility, cell division, and cell death. The T-type channels generate currents that are both transient, owing to fast inactivation, and tiny, owing to small conductance. T-type channels are thought to be involved in pacemaker activity, low-threshold calcium spikes, neuronal oscillations and resonance, and rebound burst firing. CACNA1G is also known as calcium channel, voltage-dependent, T type, alpha 1G subunit; voltage-dependent T-type calcium channel subunit alpha-1G; voltage-gated calcium channel subunit alpha Cav3.1; NBR13; Cav3.1c; Ca(V)T.1; KIAA1123; SCA42ND; or SCA42.

[0187] An exemplary sequence of a human CACNA1G mRNA transcript can be found at, for example, GenBank Accession No. GI: 1519244109 (NM_018896.5; SEQ ID NO: 21; reverse complement, SEQ ID NO: 22). The sequence of mouse CACNA1G mRNA can be found at, for example, GenBank Accession No. GI: 295444826 (NM_009783.3; SEQ ID NO: 23; reverse complement, SEQ ID NO: 24). The sequence of rat CACNA1G mRNA can be found at, for example, GenBank Accession No. GI: 1995160279 (NM_001308302.2; SEQ ID NO: 25; reverse complement, SEQ ID NO: 26). The sequence of Macaca mulatta CACNA1G mRNA can be found at, for example, GenBank Accession No. GI: 1622879013 (XM_015119270.2; SEQ ID NO: 27; reverse complement, SEQ ID NO: 28). The sequence of Macaca fascicularis CACNA1G mRNA can be found at, for example, GenBank Accession No. GI: 982305044 (XM_005583707.2; SEQ ID NO: 29; reverse complement, SEQ ID NO: 30).

[0188] Additional exemplary examples of CACNA1G mRNA sequences are readily available through publicly available databases, e.g., GenBank, UniProt, OMIM, UCSC Genome Browser, and the Macaca genome project website.

[0189] Further information on CACNA1G can be found, for example, at www.ncbi.nlm.nih.gov/gene/?term=CACNA1G.

[0190] The entire contents of each of the foregoing GenBank Accession numbers and the Gene database numbers are incorporated herein by reference as of the date of filing this application.

[0191] The term CACNA1G, as used herein, also refers to variations of the CACNA1G gene including variants provided in the SNP database. Numerous sequence variations within the CACNA1G gene have been identified and may be found at, for example, NCBI dbSNP and UniProt (see, e.g., www.ncbi.nlm.nih.gov/gene/?term=CACNA1G, the entire contents of which is incorporated herein by reference as of the date of filing this application.

[0192] As used herein, “angiotensin II receptor type 1,” used interchangeably with the term “AGTR1,” refers to a receptor for the vasoconstricting peptide angiotensin II. Angiotensin II is a potent vasopressor hormone and a primary regulator of aldosterone secretion. AGTR1 is activated by angiotensin II. The activated receptor in turn couples to G protein and, thus, activates phospholipase C and increases the cytosolic Ca2+ concentrations, which in turn triggers cellular responses such as stimulation of protein kinase C. AGTR1 plays an integral role in blood pressure control, and is implicated in the pathogenesis of hypertension. AGTR1 is also known as angiotensin receptor 1B, AT1, AT2R1, AGTR1A, AT2R1B, AGTR1B, HAT1R, AG2S, AT1B, AT2R1A, AT1AR, AT1BR, or AT1R.

[0193] An exemplary sequence of a human AGTR1 mRNA transcript can be found at, for example, GenBank Accession No. GI: 1820101583 (NM_000685.5; SEQ ID NO: 31; reverse complement, SEQ ID NO: 32). The sequence of mouse AGTR1 mRNA can be found at, for example, GenBank Accession No. GI: 158937294 (NM_177322.3; SEQ ID NO: 33; reverse complement, SEQ ID NO: 34). The sequence of rat AGTR1 mRNA can be found at, for example, GenBank Accession No. GI: 140969764 (NM_030985.4; SEQ ID NO: 35; reverse complement, SEQ ID NO: 36). The sequence of Macaca mulatta AGTR1 mRNA can be found at, for example, GenBank Accession No. GI: 1622904093 (XM_028843763.1; SEQ ID NO: 37; reverse complement, SEQ ID NO: 38). The sequence of Macaca fascicularis AGTR1 mRNA can be found at, for example, GenBank Accession No. GI: 544411901 (XM_005546040.1; SEQ ID NO: 39; reverse complement, SEQ ID NO: 40).

[0194] Additional examples of AGTR1 mRNA sequences are readily available through publicly available databases, e.g., GenBank, UniProt, OMIM, UCSC Genome Browser, and the Macaca genome project website.

[0195] Further information on AGTR1 can be found, for example, at www.ncbi.nlm.nih.gov/gene/?term=AGTR1.

[0196] The entire contents of each of the foregoing GenBank Accession numbers and the Gene database numbers are incorporated herein by reference as of the date of filing this application.

[0197] The term AGTR1, as used herein, also refers to variations of the AGTR1 gene including variants provided in the SNP database. Numerous sequence variations within the AGTR1 gene have been identified and may be found at, for example, NCBI dbSNP and UniProt (see, e.g., www.ncbi.nlm.nih.gov/gene/?term=AGTR1, the entire contents of which is incorporated herein by reference as of the date of filing this application.

[0198] As used herein, “Sodium Voltage-Gated Channel Alpha Subunit 2,” used interchangeably with the term “SCN2A,” refers to a member of the voltage-gated sodium channel family. Voltage-gated sodium channels are transmembrane glycoprotein complexes composed of a large alpha subunit with four repeat domains, each of which is composed of six membrane-spanning segments, and one or more regulatory beta subunits. Voltage-gated sodium channels function in the generation and propagation of action potentials in neurons and muscle. Specifically, SCN2A permits the sodium influx from the extracellular space into the cytosol after depolarization of the nerve membrane. Allelic variants of SCN2A are associated with seizure disorders and autism spectrum disorders. SCN2A is also known as Nav1.2, HBSCII, SCN2A1, SCN2A2, HBSCI, EIEE11, BFIC3, BFIS3, BFNIS, DEE11, EA9, or HBA.

[0199] An exemplary sequence of a human SCN2A mRNA transcript can be found at, for example, GenBank Accession No. GI: 1697699196 (NM_021007.3; SEQ ID NO: 41; reverse complement, SEQ ID NO: 42). The sequence of mouse SCN2A mRNA can be found at, for example, GenBank Accession No. GI: 1114439824 (NM_001099298.3; SEQ ID NO: 43; reverse complement, SEQ ID NO: 44). The sequence of rat SCN2A mRNA can be found at, for example, GenBank Accession No. GI: 1937915892 (NM 012647.2; SEQ ID NO: 45; reverse complement, SEQ ID NO: 46). The sequence of Macaca mulatta SCN2A mRNA can be found at, for example, GenBank Accession No. GI: 1622850108 (XM_001100368.4; SEQ ID NO: 47; reverse complement, SEQ ID NO: 48). The sequence of Macaca fascicularis SCN2A mRNA can be found at, for example, GenBank Accession No. GI: 544475515 (XM_005573351.1; SEQ ID NO: 49; reverse complement, SEQ ID NO: 50).

[0200] Additional examples of SCN2A mRNA sequences are readily available through publicly available databases, e.g., GenBank, UniProt, OMIM, UCSC Genome Browser, and the Macaca genome project website.

[0201] Further information on SCN2A can be found, for example, at www.ncbi.nlm.nih.gov/gene/?term=SCN2A.

[0202] The entire contents of each of the foregoing GenBank Accession numbers and the Gene database numbers are incorporated herein by reference as of the date of filing this application.

[0203] The term SCN2A, as used herein, also refers to variations of the SCN2A gene including variants provided in the SNP database. Numerous sequence variations within the SCN2A gene have been identified and may be found at, for example, NCBI dbSNP and UniProt (see, e.g., www.ncbi.nlm.nih.gov/gene/?term=SCN2A, the entire contents of which is incorporated herein by reference as of the date of filing this application.

[0204] As used herein, “Hyperpolarization Activated Cyclic Nucleotide Gated Potassium Channel 1,” used interchangeably with the term “HCN1,” refers to a member of the hyperpolarization-activated cyclic nucleotide-gated (HCN) channel family. These channels are primarily expressed in the heart and in the central and peripheral nervous systems. HCN channels mediate rhythmic electrical activity of cardiac pacemaker cells, and in neurons play important roles in setting resting membrane potentials, dendritic integration, neuronal pacemaking, and establishing action potential threshold. The HCN1 protein can homodimerize or heterodimerize with other pore-forming subunits to form a potassium channel. HCN1 is also known as potassium channel 1, BCNG-1, HAC-2, BCNG1, Potassium/Sodium Hyperpolarization-Activated Cyclic Nucleotide-Gated Channel 1; Brain Cyclic Nucleotide-Gated Channel 1; Hyperpolarization Activated Cyclic Nucleotide-Gated Potassium Channel 1; GEFSP10, EIEE24, or DEE24.

[0205] An exemplary sequence of a human HCN1 mRNA transcript can be found at, for example, GenBank Accession No. GI: 1519313076 (NM_021072.4; SEQ ID NO: 51; reverse complement, SEQ ID NO: 52). The sequence of mouse HCN1 mRNA can be found at, for example, GenBank Accession No. GI: 283837798 (NM_010408.3; SEQ ID NO: 53; reverse complement, SEQ ID NO: 54). The sequence of rat HCN1 mRNA can be found at, for example, GenBank Accession No. GI: 2000186052 (NM_053375.2; SEQ ID NO: 55; reverse complement, SEQ ID NO: 56). The sequence of Macaca mulatta HCN1 mRNA can be found at, for example, GenBank Accession No. GI: 1622944535 (XM_015140004.2; SEQ ID NO: 57; reverse complement, SEQ ID NO: 58). The sequence of Macaca fascicularis HCN1 mRNA can be found at, for example, GenBank Accession No. GI: 982252681 (XM_005556858.2; SEQ ID NO: 59; reverse complement, SEQ ID NO: 60).

[0206] Additional examples of HCN1 mRNA sequences are readily available through publicly available databases, e.g., GenBank, UniProt, OMIM, UCSC Genome Browser, and the Macaca genome project website.

[0207] Further information on HCN1 can be found, for example, at www.ncbi.nlm.nih.gov/gene/?term=HCN1.

[0208] The entire contents of each of the foregoing GenBank Accession numbers and the Gene database numbers are incorporated herein by reference as of the date of filing this application.

[0209] The term HCN1, as used herein, also refers to variations of the HCN1 gene including variants provided in the SNP database. Numerous sequence variations within the HCN1 gene have been identified and may be found at, for example, NCBI dbSNP and UniProt (see, e.g., www.ncbi.nlm.nih.gov/gene/?term=HCN1, the entire contents of which is incorporated herein by reference as of the date of filing this application.

[0210] As used herein, “Hyperpolarization Activated Cyclic Nucleotide Gated Potassium Channel 4,” used interchangeably with the term “HCN4,” refers to a member of the hyperpolarization-activated cyclic nucleotide-gated (HCN) channel family. The HCN4 channel transports positively charged ions into heart muscle cells. This channel is located primarily in the sino-atrial (SA) node, which is an area of specialized cells in the heart that functions as a natural pacemaker. The HCN4 channel allows potassium and sodium ions to flow into cells of the SA node. This ion flow is often called the “pacemaker current” because it generates electrical impulses that start each heartbeat and is involved in maintaining a regular heart rhythm. HCN4 is also known as Potassium/Sodium Hyperpolarization-Activated Cyclic Nucleotide-Gated Channel 4, Hyperpolarization Activated Cyclic Nucleotide-Gated Potassium Channel 4, Hyperpolarization Activated Cyclic Nucleotide-Gated Cation Channel 4 or SSS2.

[0211] An exemplary sequence of a human HCN4 mRNA transcript can be found at, for example, GenBank Accession No. GI: 1519312820 (NM_005477.3; SEQ ID NO: 61; reverse complement, SEQ ID NO: 62). The sequence of mouse HCN4 mRNA can be found at, for example, GenBank Accession No. GI: 1686254400 (NM_001081192.3; SEQ ID NO: 63; reverse complement, SEQ ID NO: 64). The sequence of rat HCN4 mRNA can be found at, for example, GenBank Accession No. GI: 1937893976 (NM 021658.2; SEQ ID NO: 65; reverse complement, SEQ ID NO: 66). The sequence of Macaca mulatta HCN4 mRNA can be found at, for example, GenBank Accession No. GI: 1622953870 (XM_002804859.3; SEQ ID NO: 67; reverse complement, SEQ ID NO: 68). The sequence of Macaca fascicularis HCN4 mRNA can be found at, for example, GenBank Accession No. GI: 982258526 (XM_005559993.2; SEQ ID NO: 69; reverse complement, SEQ ID NO: 70).

[0212] Additional examples of HCN4 mRNA sequences are readily available through publicly available databases, e.g., GenBank, UniProt, OMIM, UCSC Genome Browser, and the Macaca genome project website.

[0213] Further information on HCN4 can be found, for example, at www.ncbi.nlm.nih.gov/gene/?term=HCN4.

[0214] The entire contents of each of the foregoing GenBank Accession numbers and the Gene database numbers are incorporated herein by reference as of the date of filing this application.

[0215] The term HCN4, as used herein, also refers to variations of the HCN4 gene including variants provided in the SNP database. Numerous sequence variations within the HCN4 gene have been identified and may be found at, for example, NCBI dbSNP and UniProt (see, e.g., www.ncbi.nlm.nih.gov/gene/?term=HCN4, the entire contents of which is incorporated herein by reference as of the date of filing this application.

[0216] As used herein, “Hyperpolarization Activated Cyclic Nucleotide Gated Potassium Channel 3,” used interchangeably with the term “HCN3,” refers to a member of the hyperpolarization-activated cyclic nucleotide-gated (HCN) channel family. A study conducted in the mouse suggested that HCN3 channels might be involved in the regulation of the circadian system. HCN3 channels have also been reported to be present in the intergeniculate leaflet of the hypothalamus. HCN3 is also known as Potassium/Sodium Hyperpolarization-Activated Cyclic Nucleotide-Gated Channel 3, Hyperpolarization Activated Cyclic Nucleotide-Gated Potassium Channel 3, or KIAA1535.

[0217] An exemplary sequence of a human HCN3 mRNA transcript can be found at, for example, GenBank Accession No. GI: 1519312303 (NM_020897.3; SEQ ID NO: 71; reverse complement, SEQ ID NO: 72). The sequence of mouse HCN3 mRNA can be found at, for example, GenBank Accession No. GI: 6680190 (NM_008227.1; SEQ ID NO: 73; reverse complement, SEQ ID NO: 74). The sequence of rat HCN3 mRNA can be found at, for example, GenBank Accession No. GI: 16758501 (NM_053685.1; SEQ ID NO: 75; reverse complement, SEQ ID NO: 76). The sequence of Macaca mulatta HCN3 mRNA can be found at, for example, GenBank Accession No. GI: 1622829938 (XM_001115891.4; SEQ ID NO: 77; reverse complement, SEQ ID NO: 78). The sequence of Macaca fascicularis HCN3 mRNA can be found at, for example, GenBank Accession No. GI: 982225310 (XM_005541549.2; SEQ ID NO: 79; reverse complement, SEQ ID NO: 80).

[0218] Additional examples of HCN3 mRNA sequences are readily available through publicly available databases, e.g., GenBank, UniProt, OMIM, UCSC Genome Browser, and the Macaca genome project website.

[0219] Further information on HCN3 can be found, for example, at www.ncbi.nlm.nih.gov/gene/?term=HCN3.

[0220] The entire contents of each of the foregoing GenBank Accession numbers and the Gene database numbers are incorporated herein by reference as of the date of filing this application.

[0221] The term HCN3, as used herein, also refers to variations of the HCN3 gene including variants provided in the SNP database. Numerous sequence variations within the HCN3 gene have been identified and may be found at, for example, NCBI dbSNP and UniProt (see, e.g., www.ncbi.nlm.nih.gov/gene/?term=HCN3, the entire contents of which is incorporated herein by reference as of the date of filing this application.

[0222] As used herein, “Potassium Voltage-Gated Channel Subfamily A Member 5,” used interchangeably with the term “KCNA5,” refers to a member of the voltage-gated potassium channel family. The Voltage-gated potassium channels mediate transmembrane potassium transport in excitable membranes. These channels form tetrameric potassium-selective channels through which potassium ions pass in accordance with their electrochemical gradient, and alternate between opened and closed conformations in response to the voltage difference across the membrane. KCNA5 contains six membrane-spanning domains with a shaker-type repeat in the fourth segment. It belongs to the delayed rectifier class, the function of which could restore the resting membrane potential of beta cells after depolarization and thereby contribute to the regulation of insulin secretion. KCNA5 is also known as HPCN1, HK2, Potassium Voltage-Gated Channel, Shaker-Related Subfamily, Member 5; Voltage-Gated Potassium Channel Subunit Kv1.5; Voltage-Gated Potassium Channel HK2; Kv1.5; Insulinoma And Islet Potassium Channel; Cardiac Potassium Channel; Potassium Channel 1; ATFB7, HCK1 or PCN1.

[0223] An exemplary sequence of a human KCNA5 mRNA transcript can be found at, for example, GenBank Accession No. GI: 1653961222 (NM_002234.4; SEQ ID NO: 81; reverse complement, SEQ ID NO: 82). The sequence of mouse KCNA5 mRNA can be found at, for example, GenBank Accession No. GI: 158937280 (NM_145983.2; SEQ ID NO: 83; reverse complement, SEQ ID NO: 84). The sequence of rat KCNA5 mRNA can be found at, for example, GenBank Accession No. GI: 6981117 (NM_012972.1; SEQ ID NO: 85; reverse complement, SEQ ID NO: 86). The sequence of Macaca mulatta KCNA5 mRNA can be found at, for example, GenBank Accession No. GI: 1622843572 (XM_001102294.4; SEQ ID NO: 87; reverse complement, SEQ ID NO: 88). The sequence of Macaca fascicularis KCNA5 mRNA can be found at, for example, GenBank Accession No. GI: 982279162 (XM_005569870.2; SEQ ID NO: 89; reverse complement, SEQ ID NO: 90).

[0224] Additional examples of KCNA5 mRNA sequences are readily available through publicly available databases, e.g., GenBank, UniProt, OMIM, UCSC Genome Browser, and the Macaca genome project website.

[0225] Further information on KCNA5 can be found, for example, at www.ncbi.nlm.nih.gov/gene/?term=KCNA5.

[0226] The entire contents of each of the foregoing GenBank Accession numbers and the Gene database numbers are incorporated herein by reference as of the date of filing this application.

[0227] The term KCNA5, as used herein, also refers to variations of the KCNA5 gene including variants provided in the SNP database. Numerous sequence variations within the KCNA5 gene have been identified and may be found at, for example, NCBI dbSNP and UniProt (see, e.g., www.ncbi.nlm.nih.gov/gene/?term=KCNA5, the entire contents of which is incorporated herein by reference as of the date of filing this application.

[0228] As used herein, “Potassium Inwardly Rectifying Channel Subfamily J Member 3,” used interchangeably with the term “KCNJ3,” refers to an integral membrane protein and an inward-rectifier type potassium channel. The inward-rectifier type potassium channels have a greater tendency to allow potassium to flow into a cell rather than out of a cell. This asymmetry in potassium ion conductance plays a key role in the excitability of muscle cells and neurons. KCNJ3 is controlled by G-proteins and plays an important role in regulating heartbeat. It associates with three other G-protein-activated potassium channels to form a heteromultimeric pore-forming complex, which also couples to neurotransmitter receptors in the brain. These multimeric G-protein-gated inwardly-rectifying potassium (GIRK) channels have a wide range of physiological roles, including the regulation of heartbeat, reward mechanisms, learning and memory functions, blood platelet aggregation, insulin secretion, and lipid metabolism. KCNJ3 is also known as GIRK1, G Protein-Activated Inward Rectifier Potassium Channel 1, KGA; Potassium Channel, Inwardly Rectifying Subfamily J Member 3; Inward Rectifier K(+) Channel Kir3.1; or Potassium Inwardly-Rectifying Channel Subfamily J Member 3 Splice Variant 1e.

[0229] An exemplary sequence of a human KCNJ3 mRNA transcript can be found at, for example, GenBank Accession No. GI: 1519246021 (NM_002239.4; SEQ ID NO: 91; reverse complement, SEQ ID NO: 92). The sequence of mouse KCNJ3 mRNA can be found at, for example, GenBank Accession No. GI: 756398330 (NM_008426.2; SEQ ID NO: 93; reverse complement, SEQ ID NO: 94). The sequence of rat KCNJ3 mRNA can be found at, for example, GenBank Accession No. GI: 148747456 (NM_031610.3; SEQ ID NO: 95; reverse complement, SEQ ID NO: 96). The sequence of Macaca mulatta KCNJ3 mRNA can be found at, for example, GenBank Accession No. GI: 387849010 (NM_001261696.1; SEQ ID NO: 97; reverse complement, SEQ ID NO: 98). The sequence of Macaca fascicularis KCNJ3 mRNA can be found at, for example, GenBank Accession No. GI: 982285759 (XM_005573205.2; SEQ ID NO: 99; reverse complement, SEQ ID NO: 100).

[0230] Additional examples of KCNJ3 mRNA sequences are readily available through publicly available databases, e.g., GenBank, UniProt, OMIM, UCSC Genome Browser, and the Macaca genome project website.

[0231] Further information on KCNJ3 can be found, for example, at www.ncbi.nlm.nih.gov/gene/?term=KCNJ3.

[0232] The entire contents of each of the foregoing GenBank Accession numbers and the Gene database numbers are incorporated herein by reference as of the date of filing this application.

[0233] The term KCNJ3, as used herein, also refers to variations of the KCNJ3 gene including variants provided in the SNP database. Numerous sequence variations within the KCNJ3 gene have been identified and may be found at, for example, NCBI dbSNP and UniProt (see, e.g., www.ncbi.nlm.nih.gov/gene/?term=KCNAJ3, the entire contents of which is incorporated herein by reference as of the date of filing this application.

[0234] As used herein, “Potassium Inwardly Rectifying Channel Subfamily J Member 4,” used interchangeably with the term “KCNJ4,” refers to an integral membrane protein and inward-rectifier type potassium channel. The inward-rectifier type potassium channels have a greater tendency to allow potassium to flow into a cell rather than out of a cell. This asymmetry in potassium ion conductance plays a key role in the excitability of muscle cells and neurons. KCNJ4 can tetramerize to form functional inwardly rectifying channels, in which each monomer contains two transmembrane helix domains, an ion-selective P-loop, and cytoplasmic N- and C-terminal domains. The distribution of KCNJ4 is predominantly focused in both heart and brain, especially in the cardiac myocytes and forebrain region. KCNJ4 may play important roles in the regulation of resting membrane potential, cellular excitability and potassium homeostasis in the nervous system and various peripheral tissues. KCNJ4 is also known as HIRK2, HRK1, IRK3, HIR, Kir2.3, inward rectifier potassium channel 4; Inward Rectifier K(+) Channel Kir2.3; Potassium Voltage-Gated Channel Subfamily J Member 4; Hippocampal Inward Rectifier Potassium Channel; or Hippocampal Inward Rectifier.

[0235] An exemplary sequence of a human KCNJ4 mRNA transcript can be found at, for example, GenBank Accession No. GI: 1732746379 (NM_152868.3; SEQ ID NO: 101; reverse complement, SEQ ID NO: 102). The sequence of mouse KCNJ4 mRNA can be found at, for example, GenBank Accession No. GI: 1720383422 (XM_006520486.4; SEQ ID NO: 103; reverse complement, SEQ ID NO: 104). The sequence of rat KCNJ4 mRNA can be found at, for example, GenBank Accession No. GI: 1937901561 (NM 053870.3; SEQ ID NO: 105; reverse complement, SEQ ID NO: 106). The sequence of Macaca mulatta KCNJ4 mRNA can be found at, for example, GenBank Accession No. GI: 1622838042 (XM_015150354.2; SEQ ID NO: 107; reverse complement, SEQ ID NO: 108). The sequence of Macaca fascicularis KCNJ4 mRNA can be found at, for example, GenBank Accession No. GI: 544461851 (XM_005567299.1; SEQ ID NO: 109; reverse complement, SEQ ID NO: 110).

[0236] Additional examples of KCNJ4 mRNA sequences are readily available through publicly available databases, e.g., GenBank, UniProt, OMIM, UCSC Genome Browser, and the Macaca genome project website.

[0237] Further information on KCNJ4 can be found, for example, at www.ncbi.nlm.nih.gov/gene/?term=KCNJ4.

[0238] The entire contents of each of the foregoing GenBank Accession numbers and the Gene database numbers are incorporated herein by reference as of the date of filing this application.

[0239] The term KCNJ4, as used herein, also refers to variations of the KCNJ4 gene including variants provided in the SNP database. Numerous sequence variations within the KCNJ4 gene have been identified and may be found at, for example, NCBI dbSNP and UniProt (see, e.g., www.ncbi.nlm.nih.gov/gene/?term=KCNAJ4, the entire contents of which is incorporated herein by reference as of the date of filing this application. As used herein, “Phosphodiesterase 1,” used interchangeably with the term “PDE1,” refers to a member of the cyclic nucleotide phosphodiesterases families. Cyclic nucleotide phosphodiesterases (PDEs) are superfamily of enzymes that regulate the spatial and temporal relationship of second messenger signaling in the cellular system. Among the 11 different families of PDEs, phosphodiesterase 1 (PDE1) sub-family of enzymes hydrolyze both 3′,5′-cyclic adenosine monophosphate (cAMP) and 3′,5′-cyclic guanosine monophosphate (cGMP) in a mutually competitive manner. The catalytic activity of PDE1 is stimulated by their binding to Ca2+/calmodulin (CaM), resulting in the integration of Ca2+ and cyclic nucleotide-mediated signaling in various diseases. The PDE1 family includes three subtypes, PDE1A, PDE1B and PDE1C, which differ for their relative affinities for cAMP and cGMP. These isoforms are differentially expressed throughout the body, including the cardiovascular, central nervous system and other organs. Thus, PDE1 enzymes play a critical role in the pathophysiology of diseases through the fundamental regulation of cAMP and cGMP signaling. PDE1 is also known as Calcium/Calmodulin-Dependent 3′,5′-Cyclic Nucleotide Phosphodiesterase 1; Calcium/Calmodulin-Stimulated Cyclic Nucleotide Phosphodiesterase; CAM-PDE 1, HSPDE1, HCAM1, or EC 3.1.4.

[0240] An exemplary sequence of a human PDE1 mRNA transcript can be found at, for example, GenBank Accession No. GI: 2062580163 (NM_005019.7; SEQ ID NO: 111; reverse complement, SEQ ID NO: 112). The sequence of mouse PDE1 mRNA can be found at, for example, GenBank Accession No. GI: 227330628 (NM_001159582.1; SEQ ID NO: 113; reverse complement, SEQ ID NO: 114). The sequence of rat PDE1 mRNA can be found at, for example, GenBank Accession No. GI: 13540702 (NM_030871.1; SEQ ID NO: 115; reverse complement, SEQ ID NO: 116). The sequence of Macaca mulatta PDE1 mRNA can be found at, for example, GenBank Accession No. GI: 383872283 (NM_001257584.1; SEQ ID NO: 117; reverse complement, SEQ ID NO: 118). The sequence of Macaca fascicularis PDE1 mRNA can be found at, for example, GenBank Accession No. GI: 982286500 (XR_001483985.1; SEQ ID NO: 119; reverse complement, SEQ ID NO: 120).

[0241] Additional examples of PDE1 mRNA sequences are readily available through publicly available databases, e.g., GenBank, UniProt, OMIM, UCSC Genome Browser, and the Macaca genome project website.

[0242] Further information on PDE1 can be found, for example, at www.ncbi.nlm.nih.gov/gene/?term=PDE1.

[0243] The entire contents of each of the foregoing GenBank Accession numbers and the Gene database numbers are incorporated herein by reference as of the date of filing this application.

[0244] The term PDE1, as used herein, also refers to variations of the PDE1 gene including variants provided in the SNP database. Numerous sequence variations within the PDE1 gene have been identified and may be found at, for example, NCBI dbSNP and UniProt (see, e.g., www.ncbi.nlm.nih.gov/gene/?term=PDE1, the entire contents of which is incorporated herein by reference as of the date of filing this application.

[0245] As used herein, “myostatin,” used interchangeably with the term “MSTN,” refers to a secreted ligand of the TGF-beta (transforming growth factor-beta) superfamily of proteins. Ligands of this family bind various TGF-beta receptors leading to recruitment and activation of SMAD family transcription factors that regulate gene expression. The encoded preproprotein is proteolytically processed to generate each subunit of the disulfide-linked homodimer. This protein negatively regulates skeletal muscle cell proliferation and differentiation. Mutations in this gene are associated with increased skeletal muscle mass in humans and other mammals. Myostatin is also known as GDF8, Growth/Differentiation Factor 8, or MSLHP.

[0246] The sequence of a human myostatin mRNA transcript can be found at, for example, GenBank Accession No. GI: 1653961810 (NM_005259.3; SEQ ID NO:221; reverse complement, SEQ ID NO: 222). The sequence of mouse myostatin mRNA can be found at, for example, GenBank Accession No. GI: 922959927 (NM_010834.3; SEQ ID NO:223; reverse complement, SEQ ID NO: 224). The sequence of rat myostatin mRNA can be found at, for example, GenBank Accession No. GI: 9506906 (NM_019151.1; SEQ ID NO:225; reverse complement, SEQ ID NO: 226). The sequence of Macaca fascicularis myostatin mRNA can be found at, for example, GenBank Accession No. NM_001287623.1; SEQ ID NO: 227; reverse complement, SEQ ID NO: 228. The sequence of Macaca mulatta myostatin mRNA can be found at, for example, GenBank Accession No. GI: 121583757 (NM_001080119.1; SEQ ID NO: 229; reverse complement, SEQ ID NO: 230).

[0247] Additional examples of myostatin mRNA sequences are readily available through publicly available databases, e.g., GenBank, UniProt, OMIM, and the Macaca genome project web site.

[0248] Further information on myostatin can be found, for example, at www.ncbi.nlm.nih.gov/gene/?term=myostatin.

[0249] The entire contents of each of the foregoing GenBank Accession numbers and the Gene database numbers are incorporated herein by reference as of the date of filing this application.

[0250] The term myostatin, as used herein, also refers to variations of the myostatin gene including variants provided in the SNP database. Numerous sequence variations within the myostatin gene have been identified and may be found at, for example, NCBI dbSNP and UniProt (see, e.g., www.ncbi.nlm.nih.gov/snp/?term=myostatin, the entire contents of which is incorporated herein by reference as of the date of filing this application.

[0251] As used herein, “Cholinergic Receptor Nicotinic Alpha 1 Subunit,” used interchangeably with the term “CHRNA1,” refers to an alpha subunit of the muscle acetylcholine receptor (AChR). The muscle acetylcholine receptor consists of 5 subunits of 4 different types: 2 alpha subunits and 1 each of the beta, gamma, and delta subunits. This protein plays a role in acetylcholine binding/channel gating. After binding acetylcholine, the AChR responds by an extensive change in conformation that affects all subunits and leads to opening of an ion-conducting channel across the plasma membrane. CHRNA1 is associated with diseases associated such as Myasthenic Syndrome. CHRNA1 is also known as Cholinergic Receptor, Nicotinic, Alpha Polypeptide 1; Acetylcholine Receptor, Nicotinic, Alpha 1 (Muscle); ACHRA; CHRNA; Muscle Nicotinic Acetylcholine Receptor; CMS1A, CMS1B, CMS2A, FCCMS, SCCMS, or ACHRD.

[0252] The sequence of a human CHRNA1 mRNA transcript can be found at, for example, GenBank Accession No. GI: 1676317412 (NM_001039523.3; SEQ ID NO:231; reverse complement, SEQ ID NO: 232). The sequence of mouse CHRNA1 mRNA can be found at, for example, GenBank Accession No. GI: 425905338 (NM_007389.5; SEQ ID NO:233; reverse complement, SEQ ID NO: 234). The sequence of rat CHRNA1 mRNA can be found at, for example, GenBank Accession No. GI: 1937369362 (NM 024485.2; SEQ ID NO:235; reverse complement, SEQ ID NO: 236). The sequence of Macaca fascicularis CHRNA1 mRNA can be found at, for example, GenBank Accession No. GI: 982286285 (XM_015432377.1; SEQ ID NO: 237; reverse complement, SEQ ID NO: 238). The sequence of Macaca mulatta CHRNA1 mRNA can be found at, for example, GenBank Accession No. GI: 1622850381 (XM_001091711.4; SEQ ID NO: 239; reverse complement, SEQ ID NO: 240).

[0253] Additional examples of CHRNA1 mRNA sequences are readily available through publicly available databases, e.g., GenBank, UniProt, OMIM, and the Macaca genome project web site. Further information on CHRNA1 can be found, for example, at www.ncbi.nlm.nih.gov/gene/?term=CHRNA1.

[0254] The entire contents of each of the foregoing GenBank Accession numbers and the Gene database numbers are incorporated herein by reference as of the date of filing this application.

[0255] The term CHRNA1, as used herein, also refers to variations of the CHRNA1 gene including variants provided in the SNP database. Numerous sequence variations within the CHRNA1 gene have been identified and may be found at, for example, NCBI dbSNP and UniProt (see, e.g., www.ncbi.nlm.nih.gov/snp/?term=CHRNA1, the entire contents of which is incorporated herein by reference as of the date of filing this application.

[0256] As used herein, “Cholinergic Receptor Nicotinic Beta 1 Subunit,” used interchangeably with the term “CHRNB1,” refers to a beta subunit of the muscle acetylcholine receptor (AChR). The muscle acetylcholine receptor consists of 5 subunits of 4 different types: 2 alpha subunits and 1 each of the beta, gamma, and delta subunits. This protein plays a role in acetylcholine binding/channel gating. After binding acetylcholine, the AChR responds by an extensive change in conformation that affects all subunits and leads to opening of an ion-conducting channel across the plasma membrane. CHRNB1 is associated with diseases associated such as Myasthenic Syndrome. CHRNB1 is also known as Cholinergic Receptor, Nicotinic, Beta Polypeptide 1; Acetylcholine Receptor, Nicotinic, Beta 1 (Muscle); ACHRB; CHRNB; CMS1D, CMS2C, CMS2A, or SCCMS.

[0257] The sequence of a human CHRNB1 mRNA transcript can be found at, for example, GenBank Accession No. GI: 1519313560 (NM_000747.3; SEQ ID NO:241; reverse complement, SEQ ID NO: 242). The sequence of mouse CHRNB1 mRNA can be found at, for example, GenBank Accession No. GI: 160358781 (NM_009601.4; SEQ ID NO:243; reverse complement, SEQ ID NO: 244). The sequence of rat CHRNB1 mRNA can be found at, for example, GenBank Accession No. GI: 2048631755 (NM_001395118.1; SEQ ID NO:245; reverse complement, SEQ ID NO: 246). The sequence of Macaca fascicularis CHRNB1 mRNA can be found at, for example, GenBank Accession No. GI: 982302904 (XM_005582753.2; SEQ ID NO: 247; reverse complement, SEQ ID NO: 248). The sequence of Macaca mulatta CHRNB1 mRNA can be found at, for example, GenBank Accession No. GI: 1622877217 (XM_015118481.2; SEQ ID NO: 249; reverse complement, SEQ ID NO: 250).

[0258] Additional examples of CHRNB1 mRNA sequences are readily available through publicly available databases, e.g., GenBank, UniProt, OMIM, and the Macaca genome project web site. Further information on CHRNB1 can be found, for example, at www.ncbi.nlm.nih.gov/gene/?term=CHRNB1.

[0259] The entire contents of each of the foregoing GenBank Accession numbers and the Gene database numbers are incorporated herein by reference as of the date of filing this application.

[0260] The term CHRNB1, as used herein, also refers to variations of the CHRNB1 gene including variants provided in the SNP database. Numerous sequence variations within the CHRNB1 gene have been identified and may be found at, for example, NCBI dbSNP and UniProt (see, e.g., www.ncbi.nlm.nih.gov/snp/?term=CHRNB1, the entire contents of which is incorporated herein by reference as of the date of filing this application.

[0261] As used herein, “Cholinergic Receptor Nicotinic Delta Subunit,” used interchangeably with the term “CHRND,” refers to a delta subunit of the muscle acetylcholine receptor (AChR). The muscle acetylcholine receptor consists of 5 subunits of 4 different types: 2 alpha subunits and 1 each of the beta, gamma, and delta subunits. After binding acetylcholine, the AChR responds by an extensive change in conformation that affects all subunits and leads to opening of an ion-conducting channel across the plasma membrane. CHRND is associated with diseases associated such as Myasthenic Syndrome. CHRND is also known as ACHRD, Cholinergic Receptor, Nicotinic, Delta Polypeptide; Acetylcholine Receptor, Nicotinic, Delta (Muscle); CMS2A; CMS3A, CMS3B, CMS3C, FCCMS, or SCCMS.

[0262] The sequence of a human CHRND mRNA transcript can be found at, for example, GenBank Accession No. GI: 1519243557 (NM_000751.3; SEQ ID NO:251; reverse complement, SEQ ID NO: 252). The sequence of mouse CHRND mRNA can be found at, for example, GenBank Accession No. GI: 426214082 (NM_021600.3; SEQ ID NO:253; reverse complement, SEQ ID NO: 254). The sequence of rat CHRND mRNA can be found at, for example, GenBank Accession No. GI: 9506486 (NM 019298.1; SEQ ID NO:255; reverse complement, SEQ ID NO: 256). The sequence of Macaca fascicularis CHRND mRNA can be found at, for example, GenBank Accession No. GI: 982288086 (XM_005574618.2; SEQ ID NO: 257; reverse complement, SEQ ID NO: 258). The sequence of Macaca mulatta CHRND mRNA can be found at, for example, GenBank Accession No. GI: 1622852529 (XM_028831231.1; SEQ ID NO: 259; reverse complement, SEQ ID NO: 260).

[0263] Additional examples of CHRND mRNA sequences are readily available through publicly available databases, e.g., GenBank, UniProt, OMIM, and the Macaca genome project web site. Further information on CHRND can be found, for example, at www.ncbi.nlm.nih.gov/gene/?term=CHRND.

[0264] The entire contents of each of the foregoing GenBank Accession numbers and the Gene database numbers are incorporated herein by reference as of the date of filing this application.

[0265] The term CHRND, as used herein, also refers to variations of the CHRND gene including variants provided in the SNP database. Numerous sequence variations within the CHRND gene have been identified and may be found at, for example, NCBI dbSNP and UniProt (see, e.g., www.ncbi.nlm.nih.gov/snp/?term=CHRND, the entire contents of which is incorporated herein by reference as of the date of filing this application.

[0266] As used herein, “Cholinergic Receptor Nicotinic Epsilon Subunit,” used interchangeably with the term “CHRNE,” refers to a subunit of the acetylcholine receptor. Acetylcholine receptors at mature mammalian neuromuscular junctions are pentameric protein complexes composed of four subunits in the ratio of two alpha subunits to one beta, one epsilon, and one delta subunit. The acetylcholine receptor changes subunit composition shortly after birth when the epsilon subunit replaces the gamma subunit seen in embryonic receptors. Mutations in the epsilon subunit are associated with congenital myasthenic syndrome. CHRNE is also known as Cholinergic Receptor, Nicotinic, Epsilon; Acetylcholine Receptor, Nicotinic, Epsilon; ACHRE; CMS1D, CMS1E, CMS2A, CMS4A, CMS4B, CMS4C, FCCMS, or SCCMS.

[0267] The sequence of a human CHRNE mRNA transcript can be found at, for example, GenBank Accession No. GI: 1433531118 (NM_000080.4; SEQ ID NO: 261; reverse complement, SEQ ID NO: 262). The sequence of mouse CHRNE mRNA can be found at, for example, GenBank Accession No. GI: 6752949 (NM_009603.1; SEQ ID NO: 263; reverse complement, SEQ ID NO: 264). The sequence of rat CHRNE mRNA can be found at, for example, GenBank Accession No. GI: 8393128 (NM_017194.1; SEQ ID NO: 265; reverse complement, SEQ ID NO: 266). The sequence of Macaca fascicularis CHRNE mRNA can be found at, for example, GenBank Accession No. GI: 982302635 (XM_015437499.1; SEQ ID NO: 267; reverse complement, SEQ ID NO: 268). The sequence of Macaca mulatta CHRNE mRNA can be found at, for example, GenBank Accession No. GI: 1622876897 (XM_015118354.2; SEQ ID NO: 269; reverse complement, SEQ ID NO: 270).

[0268] Additional examples of CHRNE mRNA sequences are readily available through publicly available databases, e.g., GenBank, UniProt, OMIM, and the Macaca genome project web site. Further information on CHRNE can be found, for example, at www.ncbi.nlm.nih.gov/gene/?term=CHRNE.

[0269] The entire contents of each of the foregoing GenBank Accession numbers and the Gene database numbers are incorporated herein by reference as of the date of filing this application.

[0270] The term CHRNE, as used herein, also refers to variations of the CHRNE gene including variants provided in the SNP database. Numerous sequence variations within the CHRNE gene have been identified and may be found at, for example, NCBI dbSNP and UniProt (see, e.g., www.ncbi.nlm.nih.gov/snp/?term=CHRNE, the entire contents of which is incorporated herein by reference as of the date of filing this application.

[0271] As used herein, “Cholinergic Receptor Nicotinic Gamma Subunit,” used interchangeably with the term “CHRNG,” refers to a subunit of the acetylcholine receptor. The mammalian muscle-type acetylcholine receptor is a transmembrane pentameric glycoprotein with two alpha subunits, one beta, one delta, and one epsilon (in adult skeletal muscle) or gamma (in fetal and denervated muscle) subunit. This gene, which encodes the gamma subunit, is expressed prior to the thirty-third week of gestation in humans. The gamma subunit of the acetylcholine receptor plays a role in neuromuscular organogenesis and ligand binding and disruption of gamma subunit expression prevents the correct localization of the receptor in cell membranes. Mutations in the subunit are associated with congenital myasthenic syndrome. CHRNG is also known as Cholinergic Receptor, Nicotinic, Gamma; Acetylcholine Receptor, Nicotinic, Gamma; or ACHRG.

[0272] The sequence of a human CHRNG mRNA transcript can be found at, for example, GenBank Accession No. GI: 1441481359 (NM_005199.5; SEQ ID NO: 271; reverse complement, SEQ ID NO: 272). The sequence of mouse CHRNG mRNA can be found at, for example, GenBank Accession No. GI: 119964695 (NM_009604.3; SEQ ID NO: 273; reverse complement, SEQ ID NO: 274). The sequence of rat CHRNG mRNA can be found at, for example, GenBank Accession No. GI: 9506488 (NM_019145.1; SEQ ID NO: 275; reverse complement, SEQ ID NO: 276). The sequence of Macaca fascicularis CHRNG mRNA can be found at, for example, GenBank Accession No. GI: 982288092 (XM_005574625.3; SEQ ID NO: 277; reverse complement, SEQ ID NO: 278). The sequence of Macaca mulatta CHRNG mRNA can be found at, for example, GenBank Accession No. GI: 1622852538 (XM_028831233.1; SEQ ID NO: 279; reverse complement, SEQ ID NO: 280).

[0273] Additional examples of CHRNG mRNA sequences are readily available through publicly available databases, e.g., GenBank, UniProt, OMIM, and the Macaca genome project web site. Further information on CHRNG can be found, for example, at www.ncbi.nlm.nih.gov/gene/?term=CHRNG.

[0274] The entire contents of each of the foregoing GenBank Accession numbers and the Gene database numbers are incorporated herein by reference as of the date of filing this application.

[0275] The term CHRNG, as used herein, also refers to variations of the CHRNG gene including variants provided in the SNP database. Numerous sequence variations within the CHRNG gene have been identified and may be found at, for example, NCBI dbSNP and UniProt (see, e.g., www.ncbi.nlm.nih.gov/snp/?term=CHRNG, the entire contents of which is incorporated herein by reference as of the date of filing this application.

[0276] As used herein, “Collagen Type XIII Alpha 1 Chain,” used interchangeably with the term “COL13A1,” refers to a synaptic extracellular-matrix protein involved in the formation and maintenance of the neuromuscular synapse. COL13A1 encodes the collagen type XIII alpha1 chain (COL13A1), which is a single-pass type II transmembrane protein made of a short intracellular domain, a single transmembrane domain, and a triple-helical collagenous ectodomain. Studies have shown that patients with COL13A1 mutations underlie a myasthenic syndrome characterized by early onset muscle weakness with predominantly feeding and breathing difficulties often requiring ventilation and artificial feeding. COL13A1 is also known as COLXIIIA1, Collagen Alpha-1(XIII) Chain, or CMS19.

[0277] The sequence of a human COL13A1 mRNA transcript can be found at, for example, GenBank Accession No. GI: 1677498641 (NM_001130103.2; SEQ ID NO: 281; reverse complement, SEQ ID NO: 282). The sequence of mouse COL13A1 mRNA can be found at, for example, GenBank Accession No. GI: 755571593 (NM_007731.3; SEQ ID NO: 283; reverse complement, SEQ ID NO: 284). The sequence of rat COL13A1 mRNA can be found at, for example, GenBank Accession No. GI: 157821424 (NM_001109172.1; SEQ ID NO: 285; reverse complement, SEQ ID NO: 286). The sequence of Macaca fascicularis COL13A1 mRNA can be found at, for example, GenBank Accession No. GI: 982269148 (XM_015456252.1; SEQ ID NO: 287; reverse complement, SEQ ID NO: 288). The sequence of Macaca mulatta COL13A1 mRNA can be found at, for example, GenBank Accession No. GI: 1622966101 (XM_015147482.2; SEQ ID NO: 289; reverse complement, SEQ ID NO: 290).

[0278] Additional examples of COL13A1 mRNA sequences are readily available through publicly available databases, e.g., GenBank, UniProt, OMIM, and the Macaca genome project web site. Further information on COL13A1 can be found, for example, at www.ncbi.nlm.nih.gov/gene/?term=COL13A1.

[0279] The entire contents of each of the foregoing GenBank Accession numbers and the Gene database numbers are incorporated herein by reference as of the date of filing this application.

[0280] The term COL13A1, as used herein, also refers to variations of the COL13A1 gene including variants provided in the SNP database. Numerous sequence variations within the COL13A1 gene have been identified and may be found at, for example, NCBI dbSNP and UniProt (see, e.g., www.ncbi.nlm.nih.gov/snp/?term=COL13A1, the entire contents of which is incorporated herein by reference as of the date of filing this application.

[0281] As used herein, “Docking Protein 7,” used interchangeably with the term “DOK7,” refers to a protein that is essential for neuromuscular synaptogenesis. The protein functions in aneural activation of muscle-specific receptor kinase, which is required for postsynaptic differentiation, and in the subsequent clustering of the acetylcholine receptor in myotubes. This protein can also induce autophosphorylation of muscle-specific receptor kinase. Mutations in this gene are a cause of congenital myasthenic syndrome. DOK7 is also known as C₄orf25, Downstream Of Tyrosine Kinase 7, FLJ33718, FLJ39137, Chromosome 4 Open Reading Frame 25, CMS10, CMS1B, or FADS3.

[0282] The sequence of a human DOK7 mRNA transcript can be found at, for example, GenBank Accession No. GI: 1519242777 (NM_173660.5; SEQ ID NO: 291; reverse complement, SEQ ID NO: 292). The sequence of mouse DOK7 mRNA can be found at, for example, GenBank Accession No. GI: 1143077055 (NM_001348478.1; SEQ ID NO: 293; reverse complement, SEQ ID NO: 294). The sequence of rat DOK7 mRNA can be found at, for example, GenBank Accession No. GI: 194240570 (NM_001130062.1; SEQ ID NO: 295; reverse complement, SEQ ID NO: 296). The sequence of Macaca fascicularis DOK7 mRNA can be found at, for example, GenBank Accession No. GI: 982247946 (XM_015450057.1; SEQ ID NO: 297; reverse complement, SEQ ID NO: 298). The sequence of Macaca mulatta DOK7 mRNA can be found at, for example, GenBank Accession No. GI: 1622938489 (XM_015137905.2; SEQ ID NO: 299; reverse complement, SEQ ID NO: 300).

[0283] Additional examples of DOK7 mRNA sequences are readily available through publicly available databases, e.g., GenBank, UniProt, OMIM, and the Macaca genome project web site. Further information on DOK7 can be found, for example, at www.ncbi.nlm.nih.gov/gene/?term=DOK7.

[0284] The entire contents of each of the foregoing GenBank Accession numbers and the Gene database numbers are incorporated herein by reference as of the date of filing this application.

[0285] The term DOK7, as used herein, also refers to variations of the DOK7 gene including variants provided in the SNP database. Numerous sequence variations within the DOK7 gene have been identified and may be found at, for example, NCBI dbSNP and UniProt (see, e.g., www.ncbi.nlm.nih.gov/snp/?term=DOK7, the entire contents of which is incorporated herein by reference as of the date of filing this application.

[0286] As used herein, “LDL Receptor Related Protein 4,” used interchangeably with the term “LRP4,” refers to a member of the low-density lipoprotein receptor-related protein family. LRP4 is a single-transmembrane protein that possesses a large extracellular domain with multiple LDLR repeats, EGF-like and β-propeller repeats; a transmembrane domain; and a short C-terminal region without an identifiable catalytic motif. Mice lacking LRP4 die at birth and do not form the NMJ, indicating a critical role in neuromuscular junction (NMJ) formation. LPR4 mutation or malfunction is implicated in disorders including congenital myasthenic syndrome, myasthenia gravis, and diseases of bone or kidney. LRP4 is also known as MEGF7, LRP-4, SOST2, CLSS, Low-Density Lipoprotein Receptor-Related Protein 4, Multiple Epidermal Growth Factor-Like Domains 7, LRP10, KIAA0816, or CMS17.

[0287] The sequence of a human LRP4 mRNA transcript can be found at, for example, GenBank Accession No. GI: 1519312025 (NM_002334.4; SEQ ID NO: 301; reverse complement, SEQ ID NO: 302). The sequence of mouse LRP4 mRNA can be found at, for example, GenBank Accession No. GI: 224994222 (NM_172668.3; SEQ ID NO: 303; reverse complement, SEQ ID NO: 304). The sequence of rat LRP4 mRNA can be found at, for example, GenBank Accession No. GI: 329112575 (NM_031322.3; SEQ ID NO: 305; reverse complement, SEQ ID NO: 306). The sequence of Macaca fascicularis LRP4 mRNA can be found at, for example, GenBank Accession No. GI: 982294148 (XM_005578015.2; SEQ ID NO: 307; reverse complement, SEQ ID NO: 308). The sequence of Macaca mulatta LRP4 mRNA can be found at, for example, GenBank Accession No. GI: 1622863351 (XM_015114355.2; SEQ ID NO: 309; reverse complement, SEQ ID NO: 310).

[0288] Additional examples of LRP4 mRNA sequences are readily available through publicly available databases, e.g., GenBank, UniProt, OMIM, and the Macaca genome project web site. Further information on LRP4 can be found, for example, at www.ncbi.nlm.nih.gov/gene/?term=LRP4.

[0289] The entire contents of each of the foregoing GenBank Accession numbers and the Gene database numbers are incorporated herein by reference as of the date of filing this application.

[0290] The term LRP4, as used herein, also refers to variations of the LRP4 gene including variants provided in the SNP database. Numerous sequence variations within the LRP4 gene have been identified and may be found at, for example, NCBI dbSNP and UniProt (see, e.g., www.ncbi.nlm.nih.gov/snp/?term=LRP4, the entire contents of which is incorporated herein by reference as of the date of filing this application.

[0291] As used herein, “Muscle Associated Receptor Tyrosine Kinase,” used interchangeably with the term “MUSK,” refers to a muscle-specific tyrosine kinase receptor, which plays a central role in the formation and the maintenance of the neuromuscular junction (NMJ), the synapse between the motor neuron and the skeletal muscle. Recruitment of AGRIN by LRP4 to the MUSK signaling complex induces phosphorylation and activation of MUSK, the kinase of the complex. The activation of MUSK in myotubes regulates the formation of NMJs through the regulation of different processes including the specific expression of genes in subsynaptic nuclei, the reorganization of the actin cytoskeleton and the clustering of the acetylcholine receptors in the postsynaptic membrane. Mutations in this gene have been associated with congenital myasthenic syndrome. MUSK is also known as EC 2.7.10.1, FADS1, CMS9, FADS, Muscle, Skeletal Receptor Tyrosine-Protein Kinase, or Muscle-Specific Kinase Receptor.

[0292] The sequence of a human MUSK mRNA transcript can be found at, for example, GenBank Accession No. GI: 1609044119 (NM_005592.4; SEQ ID NO: 311; reverse complement, SEQ ID NO: 312). The sequence of mouse MUSK mRNA can be found at, for example, GenBank Accession No. GI: 260267047 (NM_001037127.2; SEQ ID NO: 313; reverse complement, SEQ ID NO: 314). The sequence of rat MUSK mRNA can be found at, for example, GenBank Accession No. GI: 1937920431 (NM_031061.2; SEQ ID NO: 315; reverse complement, SEQ ID NO: 316). The sequence of Macaca fascicularis MUSK mRNA can be found at, for example, GenBank Accession No. GI: 982300549 (XM_005581093.2; SEQ ID NO: 317; reverse complement, SEQ ID NO: 318). The sequence of Macaca mulatta MUSK mRNA can be found at, for example, GenBank Accession No. GI: 1622871800 (XM_015117113.2; SEQ ID NO: 319; reverse complement, SEQ ID NO: 320).

[0293] Additional examples of MUSK mRNA sequences are readily available through publicly available databases, e.g., GenBank, UniProt, OMIM, and the Macaca genome project web site. Further information on MUSK can be found, for example, at www.ncbi.nlm.nih.gov/gene/?term=MUSK.

[0294] The entire contents of each of the foregoing GenBank Accession numbers and the Gene database numbers are incorporated herein by reference as of the date of filing this application.

[0295] The term MUSK, as used herein, also refers to variations of the MUSK gene including variants provided in the SNP database. Numerous sequence variations within the MUSK gene have been identified and may be found at, for example, NCBI dbSNP and UniProt (see, e.g., www.ncbi.nlm.nih.gov/snp/?term=MUSK, the entire contents of which is incorporated herein by reference as of the date of filing this application.

[0296] As used herein, “Receptor Associated Protein Of The Synapse,” used interchangeably with the term “RAPSN,” refers to a member of a family of proteins that are receptor associated proteins of the synapse. The encoded protein contains a conserved cAMP-dependent protein kinase phosphorylation site, and plays a critical role in clustering and anchoring nicotinic acetylcholine receptors at synaptic sites by linking the receptors to the underlying postsynaptic cytoskeleton, possibly by direct association with actin or spectrin. Mutations in this gene may play a role in postsynaptic congenital myasthenic syndromes. RAPSN is also known as RNF205, 43 KDa Receptor-Associated Protein Of The Synapse, RING Finger Protein 205, CMS1D, CMS1E, Acetylcholine Receptor-Associated 43 Kda Protein, RAPSYN, CMS 11, CMS4C, FADS2, or FADS.

[0297] The sequence of a human RAPSN mRNA transcript can be found at, for example, GenBank Accession No. GI: 1519241818 (NM_005055.5; SEQ ID NO: 321; reverse complement, SEQ ID NO: 322). The sequence of mouse RAPSN mRNA can be found at, for example, GenBank Accession No. GI: 224967080 (NM_009023.3; SEQ ID NO: 323; reverse complement, SEQ ID NO: 324). The sequence of rat RAPSN mRNA can be found at, for example, GenBank Accession No. GI: 157819696 (NM_001108584.1; SEQ ID NO: 325; reverse complement, SEQ ID NO: 326). The sequence of Macaca fascicularis RAPSN mRNA can be found at, for example, GenBank Accession No. GI: 982294016 (XM_015434747.1; SEQ ID NO: 327; reverse complement, SEQ ID NO: 328). The sequence of Macaca mulatta RAPSN mRNA can be found at, for example, GenBank Accession No. GI: 1622863236 (XM_015114296.2; SEQ ID NO: 329; reverse complement, SEQ ID NO: 330).

[0298] Additional examples of RAPSN mRNA sequences are readily available through publicly available databases, e.g., GenBank, UniProt, OMIM, and the Macaca genome project web site. Further information on RAPSN can be found, for example, at www.ncbi.nlm.nih.gov/gene/?term=RAPSN.

[0299] The entire contents of each of the foregoing GenBank Accession numbers and the Gene database numbers are incorporated herein by reference as of the date of filing this application.

[0300] The term RAPSN, as used herein, also refers to variations of the RAPSN gene including variants provided in the SNP database. Numerous sequence variations within the RAPSN gene have been identified and may be found at, for example, NCBI dbSNP and UniProt (see, e.g., www.ncbi.nlm.nih.gov/snp/?term=RAPSN, the entire contents of which is incorporated herein by reference as of the date of filing this application.

[0301] As used herein, “Sodium Voltage-Gated Channel Alpha Subunit 4,” used interchangeably with the term “SCN4A,” refers to a member of the voltage-gated sodium channel family. Voltage-gated sodium channels are transmembrane glycoprotein complexes composed of a large alpha subunit with 24 transmembrane domains and one or more regulatory beta subunits. They are responsible for the generation and propagation of action potentials in neurons and muscle. This gene encodes one member of the sodium channel alpha subunit gene family. It is expressed in skeletal muscle, and mutations in this gene have been linked to congenital myasthenic syndrome, and several myotonia and periodic paralysis disorders. SCN4A is also known as SkM1, Nav1.4, HYPP, Sodium Channel Protein Skeletal Muscle Subunit Alpha, Voltage-Gated Sodium Channel Subunit Alpha Nav1.4, HYKPP, Skeletal Muscle Voltage-Dependent Sodium Channel Type IV Alpha Subunit, CTC-264K15.6, Na(V)1.4, HOKPP2, CMS16, or NAC1A.

[0302] The sequence of a human SCN4A mRNA transcript can be found at, for example, GenBank Accession No. GI: 93587341 (NM_000334.4; SEQ ID NO: 331; reverse complement, SEQ ID NO: 332). The sequence of mouse SCN4A mRNA can be found at, for example, GenBank Accession No. GI: 134948031 (NM_133199.2; SEQ ID NO: 333; reverse complement, SEQ ID NO: 334). The sequence of rat SCN4A mRNA can be found at, for example, GenBank Accession No. GI: 1937369400 (NM_013178.2; SEQ ID NO: 335; reverse complement, SEQ ID NO: 336). The sequence of Macaca fascicularis SCN4A mRNA can be found at, for example, GenBank Accession No. GI: 982306407 (XM_015438708.1; SEQ ID NO: 337; reverse complement, SEQ ID NO: 338). The sequence of Macaca mulatta SCN4A mRNA can be found at, for example, GenBank Accession No. GI: 1622880585 (XM_015120096.2; SEQ ID NO: 339; reverse complement, SEQ ID NO: 340).

[0303] Additional examples of SCN4A mRNA sequences are readily available through publicly available databases, e.g., GenBank, UniProt, OMIM, and the Macaca genome project web site. Further information on SCN4A can be found, for example, at www.ncbi.nlm.nih.gov/gene/?term=SCN4A.

[0304] The entire contents of each of the foregoing GenBank Accession numbers and the Gene database numbers are incorporated herein by reference as of the date of filing this application.

[0305] The term SCN4A, as used herein, also refers to variations of the SCN4A gene including variants provided in the SNP database. Numerous sequence variations within the SCN4A gene have been identified and may be found at, for example, NCBI dbSNP and UniProt (see, e.g., www.ncbi.nlm.nih.gov/snp/?term=SCN4A, the entire contents of which is incorporated herein by reference as of the date of filing this application.

[0306] As used herein, “Double Homeobox 4,” used interchangeably with the term “DUX4,” refers to a transcriptional activator of many genes. DUX4 is normally expressed during early embryonic development, and is then effectively silenced in all tissues except the testis and thymus. DUX4 has been implicated as being involved in cell death, oxidative stress, muscle differentiation and growth, epigenetic regulation, and a number of other signaling pathways in skeletal muscle. Inappropriate expression of DUX4 in muscle cells is the cause of facioscapulohumeral muscular dystrophy (FSHD), which is characterized by muscle weakness and wasting (atrophy) that worsens slowly over time. DUX4 is also known as Double Homeobox Protein 10, Double Homeobox Protein 4, Double Homeobox Protein 4/10, DUX4L, and DUX10.

[0307] The sequence of a human DUX4 mRNA transcript can be found at, for example, GenBank Accession No. GI: 1774753171 (NM_001306068.3; SEQ ID NO: 341; reverse complement, SEQ ID NO: 342). The sequence of mouse DUX4 mRNA can be found at, for example, GenBank Accession No. GI: 126432555 (NM_001081954.1; SEQ ID NO: 343; reverse complement, SEQ ID NO: 344). The sequence of rat DUX4 mRNA can be found at, for example, GenBank Accession No. GI: 1958689769 (XM_008771031.3; SEQ ID NO: 345; reverse complement, SEQ ID NO: 346). The sequence of Macaca mulatta DUX4 mRNA can be found at, for example, GenBank Accession No. GI: 1622942424 (XM_028848991.1; SEQ ID NO: 347; reverse complement, SEQ ID NO: 348).

[0308] Additional examples of DUX4 mRNA sequences are readily available through publicly available databases, e.g., GenBank, UniProt, OMIM, and the Macaca genome project web site. Further information on DUX4 can be found, for example, at www.ncbi.nlm.nih.gov/gene/?term=DUX4.

[0309] The entire contents of each of the foregoing GenBank Accession numbers and the Gene database numbers are incorporated herein by reference as of the date of filing this application.

[0310] The term DUX4, as used herein, also refers to variations of the DUX4 gene including variants provided in the SNP database. Numerous sequence variations within the DUX4 gene have been identified and may be found at, for example, NCBI dbSNP and UniProt (see, e.g., www.ncbi.nlm.nih.gov/snp/?term=DUX4, the entire contents of which is incorporated herein by reference as of the date of filing this application.

[0311] As used herein, “phospholamban,” used interchangeably with the term “PLN,” refers to a crucial regulator of cardiac contractility. PLN is a major substrate for the cAMP-dependent protein kinase in cardiac muscle. The encoded protein is an inhibitor of cardiac muscle sarcoplasmic reticulum Ca(2+)-ATPase in the unphosphorylated state, but inhibition is relieved upon phosphorylation of the protein. The subsequent activation of the Ca(2+) pump leads to enhanced muscle relaxation rates, thereby contributing to the inotropic response elicited in heart by beta-agonists. The encoded protein is a key regulator of cardiac diastolic function. Mutations in this gene are a cause of inherited human dilated cardiomyopathy with refractory congestive heart failure, and also familial hypertrophic cardiomyopathy. PLN is also known as CMD1P, PLB, Cardiac Phospholamban, or CMH.

[0312] An exemplary sequence of a human PLN mRNA transcript can be found at, for example, GenBank Accession No. GI: 1519242997 (NM_002667.5; SEQ ID NO: 349; reverse complement, SEQ ID NO: 350). The sequence of mouse PLN mRNA can be found at, for example, GenBank Accession No. GI: 213512815 (NM_001141927.1; SEQ ID NO: 351; reverse complement, SEQ ID NO: 352). The sequence of rat PLN mRNA can be found at, for example, GenBank Accession No. GI: 399124783 (NM_022707.2; SEQ ID NO: 353; reverse complement, SEQ ID NO: 354). The sequence of Macaca mulatta PLN mRNA can be found at, for example, GenBank Accession No. GI: 1863319929 (NM_001190894.2; SEQ ID NO: 355; reverse complement, SEQ ID NO: 356).

[0313] Additional examples of PLN mRNA sequences are readily available through publicly available databases, e.g., GenBank, UniProt, OMIM, UCSC Genome Browser, and the Macaca genome project web site. Further information on PLN can be found, for example, at www.ncbi.nlm.nih.gov/gene/?term=PLN.

[0314] The entire contents of each of the foregoing GenBank Accession numbers and the Gene database numbers are incorporated herein by reference as of the date of filing this application.

[0315] The term PLN, as used herein, also refers to variations of the PLN gene including variants provided in the SNP database. Numerous sequence variations within the PLN gene have been identified and may be found at, for example, NCBI dbSNP and UniProt (see, e.g., www.ncbi.nlm.nih.gov/snp/?term=PLN, the entire contents of which is incorporated herein by reference as of the date of filing this application.

[0316] As used herein, “calcium/calmodulin dependent protein kinase II delta,” used interchangeably with the term “CAMK2D,” refers to a member of the serine/threonine protein kinase family and the Ca(2+)/calmodulin-dependent protein kinase subfamily. CAMK2D is involved in the regulation of Ca(2+) homeostatis and excitation-contraction coupling in heart by targeting ion channels, transporters and accessory proteins involved in Ca(2+) influx into the myocyte, Ca(2+) release from the sarcoplasmic reticulum (SR), SR Ca(2+) uptake and Na(+) and K(+) channel transport. CAMK2D also targets transcription factors and signaling molecules to regulate heart function. In its activated form, CAMK2D is involved in the pathogenesis of dilated cardiomyopathy and heart failure. CAMK2D contributes to cardiac decompensation and heart failure by regulating SR Ca(2+) release via direct phosphorylation of RYR2 Ca(2+) channel. In the nucleus, CAMK2D phosphorylates the MEF2 repressor HDAC4, promoting its nuclear export and binding to 14-3-3 protein, and expression of MEF2 and genes involved in the hypertrophic program. CAMK2D is essential for left ventricular remodeling responses to myocardial infarction. In pathological myocardial remodeling, CAMK2D acts downstream of the beta adrenergic receptor signaling cascade to regulate key proteins involved in excitation-contraction coupling. CAMK2D regulates Ca(2+) influx to myocytes by binding and phosphorylating the L-type Ca(2+) channel subunit beta-2 CACNB2. In addition to Ca(2+) channels, CAMK2D can target and regulate the cardiac sarcolemmal Na(+) channel Nav1.5/SCN5A and the K+ channel Kv4.3/KCND3, which contribute to arrhythmogenesis in heart failure. CAMK2D phosphorylates phospholamban (PLN), an endogenous inhibitor of SERCA2A/ATP2A2, contributing to the enhancement of SR Ca(2+) uptake that may be important in frequency-dependent acceleration of relaxation and maintenance of contractile function during acidosis. CAMK2D may participate in the modulation of skeletal muscle function in response to exercise, by regulating SR Ca(2+) transport through phosphorylation of PLN and triadin, a ryanodine receptor-coupling factor. CAMK2D is also known as Calcium/Calmodulin-Dependent Protein Kinase Type II Delta Chain, CaM Kinase II Delta Subunit, CaM Kinase II Subunit Delta, CAMKD, EC 2.7.11.17, or EC 2.7.11.

[0317] An exemplary sequence of a human CAMK2D mRNA transcript can be found at, for example, GenBank Accession No. GI: 1519243899 (NM_001321571.2; SEQ ID NO: 357; reverse complement, SEQ ID NO: 358). The sequence of mouse CAMK2D mRNA can be found at, for example, GenBank Accession No. GI: 654824235 (NM_001025439.2; SEQ ID NO: 359; reverse complement, SEQ ID NO: 360). The sequence of rat CAMK2D mRNA can be found at, for example, GenBank Accession No. GI: 144922682 (NM_012519.2; SEQ ID NO: 361; reverse complement, SEQ ID NO: 362). The sequence of Macaca mulatta CAMK2D mRNA can be found at, for example, GenBank Accession No. GI: 1622941163 (XM_015139100.2; SEQ ID NO: 363; reverse complement, SEQ ID NO: 364).

[0318] Additional examples of CAMK2D mRNA sequences are readily available through publicly available databases, e.g., GenBank, UniProt, OMIM, UCSC Genome Browser, and the Macaca genome project web site. Further information on CAMK2D can be found, for example, at www.ncbi.nlm.nih.gov/gene/?term=CAMK2D.

[0319] The entire contents of each of the foregoing GenBank Accession numbers and the Gene database numbers are incorporated herein by reference as of the date of filing this application.

[0320] The term CAMK2D, as used herein, also refers to variations of the CAMK2D gene including variants provided in the SNP database. Numerous sequence variations within the CAMK2D gene have been identified and may be found at, for example, NCBI dbSNP and UniProt (see, e.g., www.ncbi.nlm.nih.gov/snp/?term=CAMK2D, the entire contents of which is incorporated herein by reference as of the date of filing this application.

[0321] As used herein, “dystrophy myotonic protein kinase,” used interchangeably with the term “DMPK,” refers to a non-receptor serine/threonine protein kinase which is necessary for the maintenance of skeletal muscle structure and function. DMPK plays a role in myocyte differentiation and survival by regulating the integrity of the nuclear envelope and the expression of muscle-specific genes. DMPK also phosphorylates PPP1R12A and inhibits the myosin phosphatase activity to regulate myosin phosphorylation. DMPK is also critical to the modulation of cardiac contractility and to the maintenance of proper cardiac conduction activity probably through the regulation of cellular calcium homeostasis. DMPK phosphorylates PLN, a regulator of calcium pumps and may regulate sarcoplasmic reticulum calcium uptake in myocytes. DMPK also phosphorylates FXYD1/PLM which is able to induce chloride currents, and may play a role in synaptic plasticity. DMPK is also known as DM1 protein kinase, DM1PK, DM1, MT-PK, MDPK, DMK, myotonin-protein kinase, myotonic dystrophy associated protein kinase, dystrophia myotonica protein kinase, myotonin protein kinase A, thymopoietin homolog, or EC 2.7.11.1.

[0322] An exemplary sequence of a human DMPK mRNA transcript can be found at, for example, GenBank Accession No. GI: 571026697 (NM_001081563.2; SEQ ID NO: 365; reverse complement, SEQ ID NO: 366). The sequence of mouse DMPK mRNA can be found at, for example, GenBank Accession No. GI: 1824718155 (NM_032418.3; SEQ ID NO: 367; reverse complement, SEQ ID NO: 368). The sequence of rat DMPK mRNA can be found at, for example, GenBank Accession No. GI: 1719749725 (NM_001372064.1; SEQ ID NO: 369; reverse complement, SEQ ID NO: 370). The sequence of Macaca fascicularis DMPK mRNA can be found at, for example, GenBank Accession No. GI: 2161880869 (XM_045381179.1; SEQ ID NO: 371; reverse complement, SEQ ID NO: 372).

[0323] Additional examples of DMPK mRNA sequences are readily available through publicly available databases, e.g., GenBank, UniProt, OMIM, UCSC Genome Browser, and the Macaca genome project web site. Further information on DMPK can be found, for example, at www.ncbi.nlm.nih.gov/gene/?term=DMPK.

[0324] The entire contents of each of the foregoing GenBank Accession numbers and the Gene database numbers are incorporated herein by reference as of the date of filing this application.

[0325] The term DMPK, as used herein, also refers to variations of the DMPK gene including variants provided in the SNP database. Numerous sequence variations within the DMPK gene have been identified and may be found at, for example, NCBI dbSNP and UniProt (see, e.g., www.ncbi.nlm.nih.gov/snp/?term=DMPK, the entire contents of which is incorporated herein by reference as of the date of filing this application.

[0326] As used herein, “glycogen synthase 1,” used interchangeably with the term “GYS1,” refers to an enzyme that catalyzes the addition of glucose monomers to the growing glycogen molecule. Glycogen is a major source of stored energy in the body. Most glucose that is taken in from food is stored as glycogen in muscle cells. During contractions of the cardiac muscle or rapid or sustained movement of skeletal muscle, glycogen stored in muscle cells is broken down to supply the cells with energy. GYS1 is produced in most cells but is most abundant in heart (cardiac) muscle and muscles used for movement (skeletal muscles). Mutations in the GYS1 gene have been found to cause a form of glycogen storage disease type 0 (GSD 0) that affects cardiac and skeletal muscle. Most GYS1 gene mutations that cause this condition lead to a lack of functional muscle glycogen synthase, resulting in a complete absence of glycogen in muscle cells. Normally, glycogen is formed from the leftover glucose that is not immediately used by cells after glucose is consumed during meals. In people with GSD 0, who cannot form glycogen, the extra sugar is released by the body. As a result, people with muscle GSD 0 do not have any stored energy, which leads to muscle pain, weakness, or episodes of fainting following moderate physical activity. Since there is no glycogen in cardiac muscle, affected individuals are also at an increased risk of cardiac arrest and sudden death, particularly after physical activity. GYS1 is also known as muscle glycogen synthase, GSY, GYS, or EC 2.4.1.11.

[0327] An exemplary sequence of a human GYS1 mRNA transcript can be found at, for example, GenBank Accession No. GI: 1519246122 (NM_002103.5; SEQ ID NO: 373; reverse complement, SEQ ID NO: 374). The sequence of mouse GYS1 mRNA can be found at, for example, GenBank Accession No. GI: 119672917 (NM_030678.3; SEQ ID NO: 375; reverse complement, SEQ ID NO: 376). The sequence of rat GYS1 mRNA can be found at, for example, GenBank Accession No. GI: 157823921 (NM_001109615.1; SEQ ID NO: 377; reverse complement, SEQ ID NO: 378). The sequence of Macaca fascicularis GYS1 mRNA can be found at, for example, GenBank Accession No. GI: 2161874347 (XM_005589837.3; SEQ ID NO: 379; reverse complement, SEQ ID NO: 380).

[0328] Additional examples of GYS1 mRNA sequences are readily available through publicly available databases, e.g., GenBank, UniProt, OMIM, UCSC Genome Browser, and the Macaca genome project web site. Further information on GYS1 can be found, for example, at www.ncbi.nlm.nih.gov/gene/?term=GYS1.

[0329] The entire contents of each of the foregoing GenBank Accession numbers and the Gene database numbers are incorporated herein by reference as of the date of filing this application.

[0330] The term GYS1, as used herein, also refers to variations of the GYS1 gene including variants provided in the SNP database. Numerous sequence variations within the GSY gene have been identified and may be found at, for example, NCBI dbSNP and UniProt (see, e.g., www.ncbi.nlm.nih.gov/snp/?term=GYS1, the entire contents of which is incorporated herein by reference as of the date of filing this application.

[0331] As used herein, “survival of motor neuron 1,” used interchangeably with the term “SMN1,” refers to one of a group of proteins called the SMN complex, which is important for the maintenance of specialized nerve cells called motor neurons. These cells are located in the spinal cord and the part of the brain that is connected to the spinal cord (the brainstem). Motor neurons transmit signals from the brain and spinal cord that tell skeletal muscles to tense (contract), which allows the body to move. In cells, the SMN complex plays an important role in processing mRNA. The SMN complex helps to assemble the cellular machinery needed to process pre-mRNA. The SMN complex is also important for the development of specialized outgrowths from nerve cells called dendrites and axons. Dendrites and axons are required for the transmission of impulses between neurons and from neurons to muscles. Many mutations in the SMN1 gene have been found to cause spinal muscular atrophy. This condition is characterized by a loss of motor neurons that leads to weakness and wasting (atrophy) in muscles used for movement (skeletal muscles) that worsens with age. SMN1 is also known as SMNT, TDRD16A, Gemin-1, BCD541, GEMINI, SMA1, SMA2, SMA3, SMA4, SMN, SMNT, tudoe domain containing 16A, complement of gems 1, or SMNC.

[0332] An exemplary sequence of a human SMN1 mRNA transcript can be found at, for example, GenBank Accession No. GI: 663070993 (NM_001297715.1; SEQ ID NO: 381; reverse complement, SEQ ID NO: 382). The sequence of mouse SMN1 mRNA can be found at, for example, GenBank Accession No. GI: 145386573 (NM_011420.2; SEQ ID NO: 383; reverse complement, SEQ ID NO: 384). The sequence of rat SMN1 mRNA can be found at, for example, GenBank Accession No. GI: 1939402010 (NM_022509.2; SEQ ID NO: 385; reverse complement, SEQ ID NO: 386). The sequence of Macaca mulatta SMN1 mRNA can be found at, for example, GenBank Accession No. GI: 386781228 (NM_001260664.1; SEQ ID NO: 387; reverse complement, SEQ ID NO: 388).

[0333] Additional examples of SMN1 mRNA sequences are readily available through publicly available databases, e.g., GenBank, UniProt, OMIM, UCSC Genome Browser, and the Macaca genome project web site. Further information on SMN1 can be found, for example, at www.ncbi.nlm.nih.gov/gene/?term=SMN1.

[0334] The entire contents of each of the foregoing GenBank Accession numbers and the Gene database numbers are incorporated herein by reference as of the date of filing this application.

[0335] The term SMN1, as used herein, also refers to variations of the SMN1 gene including variants provided in the SNP database. Numerous sequence variations within the SMN1 gene have been identified and may be found at, for example, NCBI dbSNP and UniProt (see, e.g., www.ncbi.nlm.nih.gov/snp/?term=SMN1, the entire contents of which is incorporated herein by reference as of the date of filing this application.

[0336] As used herein, “alpha-glucosidase,” used interchangeably with the term “GAA,” refers to an enzyme responsible for the degradation of glycogen to glucose in lysosomes. More than 200 mutations in the GAA gene have been identified in people with Pompe disease. Many of these mutations change one of the protein building blocks (amino acids) used to make acid alpha-glucosidase. Other mutations insert or delete genetic material in the GAA gene. Mutations in this gene significantly reduce the activity of acid alpha-glucosidase, preventing the enzyme from breaking down glycogen effectively. As a result, this complex sugar can build up to toxic levels in lysosomes.

[0337] The abnormal buildup of glycogen damages organs and tissues throughout the body, particularly the muscles, leading to progressive muscle weakness, heart problems, and the other features of Pompe disease. GAA is also known as lysosomal alpha-glucosidase, acid maltase, EC 3.2.1.20, glycogen storage disease type II, or LYAG.

[0338] An exemplary sequence of a human GAA mRNA transcript can be found at, for example, GenBank Accession No. GI: 1519245858 (NM_000152.5; SEQ ID NO: 389; reverse complement, SEQ ID NO: 390). The sequence of mouse GAA mRNA can be found at, for example, GenBank Accession No. GI: 957579368 (NM_008064.4; SEQ ID NO: 391; reverse complement, SEQ ID NO: 392). The sequence of rat GAA mRNA can be found at, for example, GenBank Accession No. GI: 40018605 (NM_199118.1; SEQ ID NO: 393; reverse complement, SEQ ID NO: 394). The sequence of Macaca mulatta GAA mRNA can be found at, for example, GenBank Accession No. GI: 1622881859 (XM_015120499.2; SEQ ID NO: 395; reverse complement, SEQ ID NO: 396).

[0339] Additional examples of GAA mRNA sequences are readily available through publicly available databases, e.g., GenBank, UniProt, OMIM, UCSC Genome Browser, and the Macaca genome project web site. Further information on GAA can be found, for example, at www.ncbi.nlm.nih.gov/gene/?term=GAA.

[0340] The entire contents of each of the foregoing GenBank Accession numbers and the Gene database numbers are incorporated herein by reference as of the date of filing this application.

[0341] The term GAA, as used herein, also refers to variations of the GAA gene including variants provided in the SNP database. Numerous sequence variations within the GAA gene have been identified and may be found at, for example, NCBI dbSNP and UniProt (see, e.g., www.ncbi.nlm.nih.gov/snp/?term=GAA, the entire contents of which is incorporated herein by reference as of the date of filing this application.

[0342] As used herein, “Mucin 5B, Oligomeric Mucus/Gel-Forming,” used interchangeably with the term “MUC5B,” refers to a member of the mucin family of proteins, which are highly glycosylated macromolecular components of mucus secretions. MUB5B is the major gel-forming mucin in mucus. It is a major contributor to the lubricating and viscoelastic properties of whole saliva, normal lung mucus and cervical mucus. This gene has been found to be up-regulated in some human diseases, including sinus mucosa of chronic rhinosinusitis (CRS), CRS with nasal polyposis, chronic obstructive pulmonary disease (COPD) and H. pylori-associated gastric disease. MUC5B is also known as mucin-5B, MUC5, MG1, high molecular weight salivary mucin MG1; mucin 5, subtype B, tracheobronchial; sublingual gland mucin; cervical mucin, or MUC9.

[0343] An exemplary sequence of a human MUC5B mRNA transcript can be found at, for example, GenBank Accession No. GI: 1519244536 (NM_002458.3; SEQ ID NO:397; reverse complement, SEQ ID NO: 398). The sequence of mouse MUC5B mRNA can be found at, for example, GenBank Accession No. GI: 147905739 (NM_028801.2; SEQ ID NO:399; reverse complement, SEQ ID NO: 400). The sequence of rat MUC5B mRNA can be found at, for example, GenBank Accession No. GI: 1958654562 (XM_039101271.1; SEQ ID NO:401; reverse complement, SEQ ID NO: 402). The sequence of Macaca mulatta MUC5B mRNA can be found at, for example, GenBank Accession No. GI: 1622861542 (XM_028833012.1; SEQ ID NO: 403; reverse complement, SEQ ID NO: 404).

[0344] Additional examples of MUC5B mRNA sequences are readily available through publicly available databases, e.g., GenBank, UniProt, OMIM, UCSC Genome Browser, and the Macaca genome project web site.

[0345] Further information on MUC5B can be found, for example, at www.ncbi.nlm.nih.gov/gene/?term=MUC5B.

[0346] The entire contents of each of the foregoing GenBank Accession numbers and the Gene database numbers are incorporated herein by reference as of the date of filing this application.

[0347] The term MUC5B, as used herein, also refers to variations of the MUC5B gene including variants provided in the SNP database. Numerous sequence variations within the MUC5B gene have been identified and may be found at, for example, NCBI dbSNP and UniProt (see, e.g., www.ncbi.nlm.nih.gov/gene/?term=MUC5B, the entire contents of which is incorporated herein by reference as of the date of filing this application.

[0348] As used herein, “Thymic Stromal Lymphopoietin,” used interchangeably with the term “TSLP,” refers to a hemopoietic cytokine which signals through a heterodimeric receptor complex composed of the TSLP receptor and the IL-7R alpha chain. TSLP mainly impacts myeloid cells and induces the release of T cell-attracting chemokines from monocytes and enhances the maturation of CD11c(+) dendritic cells. TSLP promotes T helper type 2 (TH2) cell responses that are associated with immunity in various inflammatory diseases, including asthma, allergic inflammation and chronic obstructive pulmonary disease.

[0349] An exemplary sequence of a human TSLP mRNA transcript can be found at, for example, GenBank Accession No. GI: 1519241510 (NM_033035.5; SEQ ID NO:405; reverse complement, SEQ ID NO: 406). The sequence of mouse TSLP mRNA can be found at, for example, GenBank Accession No. GI: 283945612 (NM_021367.2; SEQ ID NO:407; reverse complement, SEQ ID NO: 408). The sequence of rat TSLP mRNA can be found at, for example, GenBank Accession No. GI: 1958745494 (XM_039097381.1; SEQ ID NO:409; reverse complement, SEQ ID NO: 410). The sequence of Macaca mulatta TSLP mRNA can be found at, for example, GenBank Accession No. GI: 1622946249 (XM_001100503.4; SEQ ID NO: 411; reverse complement, SEQ ID NO: 412).

[0350] Additional examples of TSLP mRNA sequences are readily available through publicly available databases, e.g., GenBank, UniProt, OMIM, UCSC Genome Browser, and the Macaca genome project web site.

[0351] Further information on TSLP can be found, for example, at www.ncbi.nlm.nih.gov/gene/?term=TSLP.

[0352] The entire contents of each of the foregoing GenBank Accession numbers and the Gene database numbers are incorporated herein by reference as of the date of filing this application.

[0353] The term TSLP, as used herein, also refers to variations of the TSLP gene including variants provided in the SNP database. Numerous sequence variations within the TSLP gene have been identified and may be found at, for example, NCBI dbSNP and UniProt (see, e.g., www.ncbi.nlm.nih.gov/gene/?term=TSLP, the entire contents of which is incorporated herein by reference as of the date of filing this application.

[0354] As used herein, “Interleukin 33,” used interchangeably with the term “IL33,” refers to an alarmin cytokine from the Il-1 family. IL33 binds to and signals through the IL1RL1/ST2 receptor which in turn activates NF-kappa-B and MAPK signaling pathways in target cells. IL33 is involved in the maturation of Th2 cells inducing the secretion of T-helper type 2-associated cytokines. IL33 is also involved in activation of mast cells, basophils, eosinophils and natural killer cells. IL33 acts as a chemoattractant for Th2 cells, and function as an alarmin that amplifies immune responses during tissue injury. IL33 is also known as NF-HEV, IL1F11, C₉orf26, DVS27, Nuclear Factor From High Endothelial Venules, Interleukin-1 Family Member 11, Chromosome 9 Open Reading Frame 26 (NF-HEV), or DKFZp586H0523.

[0355] An exemplary sequence of a human IL33 mRNA transcript can be found at, for example, GenBank Accession No. GI: 1677537223 (NM_033439.4; SEQ ID NO:413; reverse complement, SEQ ID NO: 414). The sequence of mouse IL33 mRNA can be found at, for example, GenBank Accession No. GI: 1341395582 (NM_001164724.2; SEQ ID NO:415; reverse complement, SEQ ID NO: 416). The sequence of rat IL33 mRNA can be found at, for example, GenBank Accession No. GI: 62079056 (NM_001014166.1; SEQ ID NO:417; reverse complement, SEQ ID NO: 418). The sequence of Macaca mulatta IL33 mRNA can be found at, for example, GenBank Accession No. GI: 1622872669 (XM_015117709.2; SEQ ID NO: 419; reverse complement, SEQ ID NO: 420).

[0356] Additional examples of IL33 mRNA sequences are readily available through publicly available databases, e.g., GenBank, UniProt, OMIM, UCSC Genome Browser, and the Macaca genome project web site.

[0357] Further information on IL33 can be found, for example, at www.ncbi.nlm.nih.gov/gene/?term=IL33.

[0358] The entire contents of each of the foregoing GenBank Accession numbers and the Gene database numbers are incorporated herein by reference as of the date of filing this application.

[0359] The term IL33, as used herein, also refers to variations of the IL33 gene including variants provided in the SNP database. Numerous sequence variations within the IL33 gene have been identified and may be found at, for example, NCBI dbSNP and UniProt (see, e.g., www.ncbi.nlm.nih.gov/gene/?term=IL33, the entire contents of which is incorporated herein by reference as of the date of filing this application.

[0360] As used herein, “Arachidonate 15-Lipoxygenase,” used interchangeably with the term “ALOX15,” refers to a member of the lipoxygenase family of proteins. ALOX15 acts on various polyunsaturated fatty acid substrates to generate various bioactive lipid mediators such as eicosanoids, hepoxilins, lipoxins, and other molecules. The encoded enzyme and its reaction products have been shown to regulate inflammation and immunity. ALOX15 plays an important role during the maintenance of self-tolerance by peroxidizing membrane-bound phosphatidylethanolamine which can then signal the sorting process for clearance of apoptotic cells during inflammation and prevent an autoimmune response. In addition to its role in the immune and inflammatory responses, ALOX15 may play a role in epithelial wound healing in the cornea through production of lipoxin A4 (LXA(4)) and docosahexaenoic acid-derived neuroprotectin D1, both lipid autacoids exhibit anti-inflammatory and neuroprotective properties. Furthermore, ALOX15 may regulate actin polymerization which is crucial for several biological processes such as the phagocytosis of apoptotic cells. ALOX15 is also implicated in the generation of endogenous ligands for peroxisome proliferator activated receptor (PPAR-gamma), hence modulating macrophage development and function. ALOX15 may also exert a negative effect on skeletal development by regulating bone mass through this pathway. Finally, ALOX15 is also involved in the cellular response to IL13. ALOX15 is also known as 15-LOX-1, Polyunsaturated Fatty Acid Lipoxygenase ALOX15, Arachidonate 12-Lipoxygenase, Leukocyte-Type, Arachidonate Omega-6 Lipoxygenase, Hepoxilin A3 Synthase Alox15, Linoleate 13S-Lipoxygenase, 12/15-Lipoxygenase, 12-LOX, LOG15, 15-Lipoxygenase Type 1, EC 1.13.11.31, EC 1.13.11.33, EC 1.13.11.12, EC 1.13.11, or EC 1.13.11.

[0361] An exemplary sequence of a human ALOX15 mRNA transcript can be found at, for example, GenBank Accession No. GI: 1698254589 (NM_001140.5; SEQ ID NO:421; reverse complement, SEQ ID NO: 422). The sequence of mouse ALOX15 mRNA can be found at, for example, GenBank Accession No. GI: 134948632 (NM_009660.3; SEQ ID NO:423; reverse complement, SEQ ID NO: 424). The sequence of rat ALOX15 mRNA can be found at, for example, GenBank Accession No. GI: 31542124 (NM_031010.2; SEQ ID NO:425; reverse complement, SEQ ID NO: 426). The sequence of Macaca mulatta ALOX15 mRNA can be found at, for example, GenBank Accession No. GI: 1622876822 (XM_028835918.1; SEQ ID NO: 427; reverse complement, SEQ ID NO: 428).

[0362] Additional examples of ALOX15 mRNA sequences are readily available through publicly available databases, e.g., GenBank, UniProt, OMIM, UCSC Genome Browser, and the Macaca genome project web site.

[0363] Further information on ALOX15 can be found, for example, at www.ncbi.nlm.nih.gov/gene/?term=ALOX15.

[0364] The entire contents of each of the foregoing GenBank Accession numbers and the Gene database numbers are incorporated herein by reference as of the date of filing this application.

[0365] The term ALOX15, as used herein, also refers to variations of the ALOX15 gene including variants provided in the SNP database. Numerous sequence variations within the ALOX15 gene have been identified and may be found at, for example, NCBI dbSNP and UniProt (see, e.g., www.ncbi.nlm.nih.gov/gene/?term=ALOX15, the entire contents of which is incorporated herein by reference as of the date of filing this application.

[0366] As used herein, “advanced glycosylation end-product specific receptor,” used interchangeably with the terms “AGER” and “RAGE,” refers to a member of the immunoglobulin superfamily of cell surface receptors. It is a multiligand receptor, and besides AGE, interacts with other molecules implicated in homeostasis, development, and inflammation, and certain diseases, such as diabetes and Alzheimer's disease.

[0367] An exemplary sequence of a human AGER mRNA transcript can be found at, for example, GenBank Accession No. NM_001136.5 (SEQ ID NO:429; reverse complement, SEQ ID NO: 430). The sequence of mouse AGER mRNA can be found at, for example, GenBank Accession No. NM_007425.3 (SEQ ID NO:431; reverse complement, SEQ ID NO: 432). The sequence of rat AGER mRNA can be found at, for example, GenBank Accession No. NM_053336.2 (SEQ ID NO:433; reverse complement, SEQ ID NO: 434). The sequence of Macaca mulatta AGER mRNA can be found at, for example, GenBank Accession No. NM_001205117.1 (SEQ ID NO: 435; reverse complement, SEQ ID NO: 436).

[0368] Additional examples of AGER mRNA sequences are readily available through publicly available databases, e.g., GenBank (e.g., NM_001136.5; NM_001206929.2; NM_001206932.2; NM_001206934.2; NM_001206936.; NM_001206940.2; NM_001206954.2; NM_001206966.2; NM_172197.3), UniProt, OMIM, UCSC Genome Browser, and the Macaca genome project web site.

[0369] Further information on AGER can be found, for example, at www.ncbi.nlm.nih.gov/gene/?term=AGER.

[0370] The entire contents of each of the foregoing GenBank Accession numbers and the Gene database numbers are incorporated herein by reference as of the date of filing this application.

[0371] The term AGER, as used herein, also refers to variations of the AGER gene including variants provided in the SNP database. Numerous sequence variations within the AGER gene have been identified and may be found at, for example, NCBI dbSNP and UniProt (see, e.g., www.ncbi.nlm.nih.gov/snp/?term=AGER, the entire contents of which is incorporated herein by reference as of the date of filing this application.

[0372] As used herein, “mucin 5AC, oligomeric mucus/gel-forming,” used interchangeably with the terms “MUC5AC” and “MUC5,” and “TBM,” refers to a member of the extracellular matrix structural constituent involved in phosphatidylinositol-mediated signaling. Located in cytoplasm; extracellular space; and mucus layer. Biomarker of several diseases, including Sjogren's syndrome; biliary tract disease (multiple); cystic fibrosis; eye disease (multiple); and pancreatic cancer (multiple). MUC5AC is known to contribute to severe muco-obstructive lung diseases, worsening chronic obstructive pulmonary disease (COPD) pathogenesis. Genomewide association studies have highlighted the causative role of increased MUC5AC expression in the pathogenesis of moderate and severe asthma. Overexpression of airway mucins, such as MUC5AC, has been described in idiopathic pulmonary fibrosis (IPF) lungs.

[0373] An exemplary sequence of a human MUC5AC mRNA transcript can be found at, for example, GenBank Accession No. NM_001304359.2 (SEQ ID NO:437; reverse complement, SEQ ID NO: 438). The sequence of mouse MUC5AC mRNA can be found at, for example, GenBank Accession No. NM_010844.3 (SEQ ID NO:439 reverse complement, SEQ ID NO: 440). The sequence of rat MUC5AC mRNA can be found at, for example, GenBank Accession No. NM_001419868 (SEQ ID NO:441; reverse complement, SEQ ID NO: 442). The sequence of Macaca mulatta MUC5AC mRNA can be found at, for example, GenBank Accession No. XM_028832999.1 (SEQ ID NO: 443; reverse complement, SEQ ID NO: 444).

[0374] Additional examples of MUC5AC mRNA sequences are readily available through publicly available databases, e.g., GenBank, UniProt, OMIM, UCSC Genome Browser, and the Macaca genome project web site.

[0375] Further information on MUC5AC can be found, for example, at www.ncbi.nlm.nih.gov/gene/?term=MUC5AC.

[0376] The entire contents of each of the foregoing GenBank Accession numbers and the Gene database numbers are incorporated herein by reference as of the date of filing this application.

[0377] The term MUC5AC, as used herein, also refers to variations of the MUC5AC gene including variants provided in the SNP database. Numerous sequence variations within the MUC5AC gene have been identified and may be found at, for example, NCBI dbSNP and UniProt (see, e.g., www.ncbi.nlm.nih.gov/snp/?term=MUC5AC, the entire contents of which is incorporated herein by reference as of the date of filing this application.

[0378] As used herein, “signal transducer and activator of transcription factor 6,” used interchangeably with the term “STAT6,” refers to a member of the STAT family of transcription factors. In response to cytokines and growth factors, STAT family members are phosphorylated by the receptor associated kinases, and then form homo- or heterodimers that translocate to the cell nucleus where they act as transcription activators. STAT6 has been demonstrated to regulate many pathologic features of lung inflammatory responses in animal models including airway eosinophilia, epithelial mucus production, smooth muscle changes, Th2 cell differentiation, and IgE production from B cells (Wurster A L, et al., Oncogene 2000; 19:2577-84). STAT6 is also known as interleukin-4 induced, IL-4-STAT, D12S1644, STAT6B, or STAT6C.

[0379] The sequence of a human STAT6 mRNA transcript can be found at, for example, GenBank Accession No. GI: 1519313969 (NM_003153.5; SEQ ID NO:445; reverse complement, SEQ ID NO: 446). The sequence of mouse STAT6 mRNA can be found at, for example, GenBank Accession No. GI: 128485773 (NM_009284.2; SEQ ID NO:447; reverse complement, SEQ ID NO: 448). The sequence of rat STAT6 mRNA can be found at, for example, GenBank Accession No. GI: 113205499 (NM_001044250.1; SEQ ID NO:449; reverse complement, SEQ ID NO: 450). The sequence of Macaca fascicularis STAT6 mRNA can be found at, for example, GenBank Accession No. GI: 982282006 (XM_005571286.2; SEQ ID NO: 451; reverse complement, SEQ ID NO: 452). The sequence of Macaca mulatta STAT6 mRNA can be found at, for example, GenBank Accession No. GI: 1622842915 (XM_015152044.2; SEQ ID NO: 453; reverse complement, SEQ ID NO: 454).

[0380] Additional examples of STAT6 mRNA sequences are readily available through publicly available databases, e.g., GenBank, UniProt, OMIM, and the Macaca genome project web site. Further information on STAT6 can be found, for example, at www.ncbi.nlm.nih.gov/gene/?term=STAT6.

[0381] The entire contents of each of the foregoing GenBank Accession numbers and the Gene database numbers are incorporated herein by reference as of the date of filing this application.

[0382] The term STAT6, as used herein, also refers to variations of the STAT6 gene including variants provided in the SNP database. Numerous sequence variations within the STAT6 gene have been identified and may be found at, for example, NCBI dbSNP and UniProt (see, e.g., www.ncbi.nlm.nih.gov/snp/?term=STAT6, the entire contents of which is incorporated herein by reference as of the date of filing this application.

[0383] In some embodiments, the double-stranded region of a double-stranded iRNA agent is equal to or at least, 10, 11, 12, 13, 14, 15, 16, 17, 18, 19, 20, 21, 22, 23, 23, 24, 25, 26, 27, 28, 29, 30 or more nucleotide pairs in length.

[0384] In some embodiments, the antisense strand of a double-stranded iRNA agent is equal to or at least 14, 15, 16, 17, 18, 19, 20, 21, 22, 23, 23, 24, 25, 26, 27, 28, 29, or 30 nucleotides in length.

[0385] In some embodiments, the sense strand of a double-stranded iRNA agent is equal to or at least 10, 11, 12, 13, 14, 15, 16, 17, 18, 19, 20, 21, 22, 23, 23, 24, 25, 26, 27, 28, 29, or 30 nucleotides in length.

[0386] In one embodiment, the sense and antisense strands of the double-stranded iRNA agent are each independently 15 to 30 nucleotides in length.

[0387] In one embodiment, the sense and antisense strands of the double-stranded iRNA agent are each independently 19 to 25 nucleotides in length.

[0388] In one embodiment, the sense and antisense strands of the double-stranded iRNA agent are each independently 21 to 23 nucleotides in length.

[0389] In one embodiment, the sense strand of the iRNA agent is 21-nucleotides in length, and the antisense strand is 23-nucleotides in length, wherein the strands form a double-stranded region of 21 consecutive base pairs having a 2-nucleotide long single stranded overhangs at the 3′-end.

[0390] In one aspect of the invention, an agent for use in the methods and compositions of the invention is a single-stranded antisense nucleic acid molecule that inhibits a target mRNA via an antisense inhibition mechanism. The single-stranded antisense RNA molecule is complementary to a sequence within the target mRNA. The single-stranded antisense oligonucleotides can inhibit translation in a stoichiometric manner by base pairing to the mRNA and physically obstructing the translation machinery, see Dias, N. et al., (2002) Mol Cancer Ther 1:347-355. The single-stranded antisense RNA molecule may be about 15 to about 30 nucleotides in length and have a sequence that is complementary to a target sequence. For example, the single-stranded antisense RNA molecule may comprise a sequence that is at least about 15, 16, 17, 18, 19, 20, or more contiguous nucleotides from any one of the antisense sequences described herein.

[0391] In one embodiment, at least partial suppression of the expression of a target gene, is assessed by a reduction of the amount of target mRNA which can be isolated from or detected in a first cell or group of cells in which a target gene is transcribed and which has or have been treated such that the expression of a target gene is inhibited, as compared to a second cell or group of cells substantially identical to the first cell or group of cells but which has or have not been so treated (control cells). The degree of inhibition may be expressed in terms of.

$$\frac{( mRNA in control cells ) - ( mRNA in treated cells )}{( mRNA in control cells )} 100 \%$$

[0392] In one embodiment, inhibition of expression is determined by the dual luciferase method wherein the RNAi agent is present at 10 nM.

[0393] The phrase “contacting a cell with an RNAi agent,” such as a dsRNA, as used herein, includes contacting a cell by any possible means. Contacting a cell with an RNAi agent includes contacting a cell in vitro with the RNAi agent or contacting a cell in vivo with the RNAi agent. The contacting may be done directly or indirectly. Thus, for example, the RNAi agent may be put into physical contact with the cell by the individual performing the method, or alternatively, the RNAi agent may be put into a situation that will permit or cause it to subsequently come into contact with the cell.

[0394] Contacting a cell in vitro may be done, for example, by incubating the cell with the RNAi agent. Contacting a cell in vivo may be done, for example, by injecting the RNAi agent into or near the tissue where the cell is located, or by injecting the RNAi agent into another area, or to the bloodstream or the subcutaneous space, such that the agent will subsequently reach the tissue where the cell to be contacted is located. In some embodiments, the RNAi agent may contain or be coupled to a ligand, e.g., one or more alpha-v-beta-6 (αvβ6) integrin targeting ligand.

[0395] An “alpha-v-beta-6 (αvβ6) integrin targeting ligand”, as used herein, includes any moiety (e.g., peptides and small molecules) which bind an αvβ6 integrin and are able to mediate delivery of a dsRNA agent to which they are attached to skeletal muscle (e.g., skeletal muscle cell or skeletal muscle tissue) and/or cardiac muscle (e.g., cardiac muscle cell or cardiac muscle tissue). The αvβ6 integrin targeting ligands bind αvβ6 integrin or the αvβ6 integrin receptor on skeletal muscle/cardiac myocytes (cells). Exemplary αvβ6 integrin targeting ligands are described in Section II below.

[0396] In one embodiment, contacting a cell with an RNAi agent includes “introducing” or “delivering the RNAi agent into the cell” by facilitating or effecting uptake or absorption into the cell. Absorption or uptake of a RNAi agent can occur through unaided diffusive or active cellular processes, or by auxiliary agents or devices. Introducing a RNAi agent into a cell may be in vitro or in vivo. For example, for in vivo introduction, a RNAi agent can be injected into a tissue site or administered systemically. In vitro introduction into a cell includes methods known in the art such as electroporation and lipofection. Further approaches are described herein below or are known in the art.

[0397] As used herein, a “subject” is an animal, such as a mammal, including a primate (such as a human, a non-human primate, e.g., a monkey, and a chimpanzee), or a non-primate (such as a cow, a pig, a horse, a goat, a rabbit, a sheep, a hamster, a guinea pig, a cat, a dog, a rat, or a mouse), or a bird that expresses the target gene, either endogenously or heterologously. In one embodiment, the subject is a human, such as a human being treated or assessed for a disease, disorder, or condition that would benefit from reduction in target gene expression; a human at risk for a disease, disorder, or condition that would benefit from reduction in target gene expression; a human having a disease, disorder, or condition that would benefit from reduction in target gene expression; or human being treated for a disease, disorder, or condition that would benefit from reduction in target gene expression as described herein. In some embodiments, the subject is a female human. In other embodiments, the subject is a male human. In one embodiment, the subject is an adult subject. In another embodiment, the subject is a pediatric subject.

[0398] As used herein, the terms “treating” or “treatment” refer to a beneficial or desired result including, but not limited to, alleviation or amelioration of one or more signs or symptoms associated with target gene expression or target gene protein production, e.g., a target gene-associated disease, e.g., a muscle disorder, e.g., a skeletal muscle disorder, and/or a cardiac muscle disorder, or symptoms associated with unwanted target gene expression; diminishing the extent of unwanted target activation or stabilization; amelioration or palliation of unwanted target activation or stabilization. “Treatment” can also mean prolonging survival as compared to expected survival in the absence of treatment.

[0399] The term “lower” in the context of the level of a target gene in a subject or a disease marker or symptom refers to a statistically significant decrease in such level. The decrease can be, for example, at least 10%, 15%, 20%, 25%, 30%, %, 40%, 45%, 50%, 55%, 60%, 65%, 70%, 75%, 80%, 85%, 90%, 95%, or more. In certain embodiments, a decrease is at least 20%. In certain embodiments, the decrease is at least 50% in a disease marker, e.g., protein or gene expression level. “Lower” in the context of the level of a target gene in a subject is a decrease to a level accepted as within the range of normal for an individual without such disorder. In certain embodiments, the expression of the target is normalized, i.e., decreased towards or to a level accepted as within the range of normal for an individual without such disorder, e.g., blood glucose level, blood uric acid level, blood lipid level, blood oxygen level, white blood cell count, kidney function, spleen function, liver function. For example, chronic hyperuricemia is defined as serum urate levels greater than 6.8 mg/dl (greater than 360 mmol/), the level above which the physiological saturation threshold is exceeded (Mandell, Cleve. Clin. Med. 75:S5-S8, 2008). As used here, “lower” in a subject can refer to lowering of gene expression or protein production in a cell in a subject does not require lowering of expression in all cells or tissues of a subject. For example, as used herein, lowering in a subject can include lowering of gene expression or protein production in a subject.

[0400] The term “lower” can also be used in association with normalizing a symptom of a disease or condition, i.e. decreasing the difference between a level in a subject suffering from a target gene-associated disease towards or to a level in a normal subject not suffering from a target gene-associated disease. As used herein, if a disease is associated with an elevated value for a symptom, “normal” is considered to be the upper limit of normal. If a disease is associated with a decreased value for a symptom, “normal” is considered to be the lower limit of normal.

[0401] As used herein, “prevention” or “preventing,” when used in reference to a disease, disorder, or condition thereof, that would benefit from a reduction in expression of a target gene or production of a target protein, refers to a reduction in the likelihood that a subject will develop a symptom associated with such a disease, disorder, or condition, e.g., a symptom of a target gene-associated disease. The failure to develop a disease, disorder, or condition, or the reduction in the development of a symptom associated with such a disease, disorder, or condition (e.g., by at least about 10% on a clinically accepted scale for that disease or disorder), or the exhibition of delayed symptoms delayed (e.g., by days, weeks, months or years) is considered effective prevention.

[0402] As used herein, the term “target gene-associated disease,” is a disease or disorder that would benefit from reduction in the expression or activity of the target gene. The term “target gene-associated disease,” is a disease or disorder that is caused by, or associated with expression or protein production of the target gene. The term “target gene-associated disease” includes a disease, disorder or condition that would benefit from a decrease in expression or protein activity of the target gene. Additional information regarding specific target genes and disease that would benefit from reduction in expression of the target gene are described below.

[0403] In one embodiment, the target gene-associated disease is a muscle disorder.

[0404] Exemplary muscle disorders include Myostatin-related muscle hypertrophy, congenital myasthenic syndrome, facioscapulohumeral muscular dystrophy (FSHD), Spinal Muscular Atrophy (SMA), Myotonic Dystrophy Type 1 (DM1), Pompe disease, PLN cardiomyopathy, spasticity, obstructive hypertrophic cardiomyopathy (HOCM); familial hypertrophic cardiomyopathy (FHC); Heart failure with preserved ejection fraction (HFPEF); atrial fibrillation (AFIB); ventricular fibrillation (VFIB); angina; myocardial infarction (MI); heart failure or heart failure with reduced ejection fraction (HFREF); supraventricular tachycardia (SVT); hypertrophic cardiomyopathy (HCM); and PLN cardiomyopathy.

[0405] In one embodiment, the target gene-associated disease is a skeletal muscle disease or disorder.

[0406] In one embodiment, the target gene-associated disease is a cardiac muscle disease or disorder.

[0407] Exemplary cardiac muscle disorders include obstructive hypertrophic cardiomyopathy (HOCM); familial hypertrophic cardiomyopathy (FHC); Heart failure with preserved ejection fraction (HFPEF); atrial fibrillation (AFIB); ventricular fibrillation (VFIB); angina; myocardial infarction (MI); heart failure or heart failure with reduced ejection fraction (HFREF); supraventricular tachycardia (SVT); hypertrophic cardiomyopathy (HCM); and PLN cardiomyopathy.

[0408] “Heart failure” (“HF”) or “congestive heart failure” (“CHF”) is a chronic condition in which the heart doesn't pump blood as well as it should. Heart failure occurs when the heart's capacity to pump blood cannot keep up with the body's need. Heart failure can occur if the heart cannot pump (systolic) or fill (diastolic) adequately. As the heart weakens, blood begins to back up and force liquid through the capillary walls. The term “congestive” refers to the resulting buildup of fluid in the ankles and feet, arms, lungs, and/or other organs.

[0409] One type of heart failure is “heart failure with preserved left ventricular function” (“HF-pEF”) also known as “heart failure with preserved ejection fraction” (“HF-pEF”) is a condition in which the heart contracts and pumps normally, but the ventricles are thicker and stiffer than normal. Because of this, the ventricles can't relax properly and fill up all the way. Because there's less blood in the ventricles, less blood is pumped out to the rest of the body when the heart contracts.

[0410] The most common cause of congestive heart failure is coronary artery disease. Risk factors for coronary artery disease include high levels of cholesterol and/or triglyceride, high blood pressure, poor diet, a sedentary lifestyle, diabetes, smoking, being overweight or obese, and stress. In addition to coronary artery disease, several other conditions can damage the heart muscles, including inherited and genetic factors, some infections and autoimmune diseases and some treatments such as chemotherapy.

[0411] Symptoms of CHF include shortness of breath, fatigue, swollen legs, and rapid heartbeat.

[0412] Treatments can include eating less salt, limiting fluid intake, and taking prescription medications, e.g., vasodilators, diuretics, aldosterone inhibitors, ACE inhibitors or ARB drugs, digitalis glycosides, anticoagulants or antiplatelets, beta-blockers, and tranquilizers, and surgical procedures, include for example, bypass surgery, heart valve replacement, implantation of a pacemaker, e.g., biventricular pacing therapy or an implantable cardioverter defibrillator, ventricular assist devices (VAD therapy), and heart transplant.

[0413] “Hypertrophic cardiomyopathy” (“HCM”) refers to impaired heart function associated with abnormally thick heart muscle in the absence of other heart disease; e.g., valvular heart disease. “Hypertrophic obstructive cardiomyopathy” (“HOCM”) is a subtype of HCM, where the wall (septum) between the two bottom chambers of the heart thickens. The walls of the pumping chamber can also become stiff. The thickened septum may cause a narrowing that can block or reduce the blood flow from the left ventricle to the aorta, which is a condition called “outflow tract obstruction.”

[0414] Both HCM and HOCM may be caused by heart muscle gene mutation, which may be inherited. As such, multiple family members may be affected by HCM and HOCM. Phenotypic expression of the gene mutation may be variable.

[0415] Both HCM and HOCM may be caused by heart muscle gene mutation, which may be inherited. As such, multiple family members may be affected by HCM and HOCM. Phenotypic expression of the gene mutation may be variable. In other words, even with the same gene mutation, the severity of heart function impairment may vary between affected patients.

[0416] Symptoms associated with HCM may vary in severity and character as well, including, fatigue, chest pain, dyspnea, abnormal heart rhythm, heart failure, syncope, and sudden cardiac death.

[0417] Treatments include pacemakers, defibrillators, alcohol septal ablation, surgical myectomy, advanced heart failure therapy, beta blockers, calcium channel blockers, and anti-arrhythmics.

[0418] “Familial hypertrophic cardiomyopathy” is an autosomal dominant disease characterized mainly by left ventricular hypertrophy. Thickening usually occurs in the interventricular septum. In some, thickening of the interventricular septum impedes the flow of oxygen-rich blood from the heart, which may lead to an abnormal heart sound during a heartbeat (heart murmur) and other signs and symptoms of the condition. Other affected individuals do not have physical obstruction of blood flow, but the pumping of blood is less efficient, which can also lead to symptoms of the condition. Cardiac hypertrophy often begins in adolescence or young adulthood, although it can develop at any time throughout life.

[0419] The symptoms of familial hypertrophic cardiomyopathy are variable, even within the same family. Many affected individuals have no symptoms. Other people with familial hypertrophic cardiomyopathy may experience chest pain; shortness of breath, especially with physical exertion; a sensation of fluttering or pounding in the chest (palpitations); lightheadedness; dizziness; and fainting.

[0420] While most people with familial hypertrophic cardiomyopathy are symptom-free or have only mild symptoms, this condition can have serious consequences. It can cause abnormal heart rhythms (arrhythmias) that may be life threatening. People with familial hypertrophic cardiomyopathy have an increased risk of sudden death, even if they have no other symptoms of the condition. A small number of affected individuals develop potentially fatal heart failure, which may require heart transplantation.

[0421] Mutations in one of several genes can cause familial hypertrophic cardiomyopathy; the most commonly involved genes are MYH7, MYBPC3, TNNT2, and TNNI3. Other genes, including some that have not been identified, may also be involved in this condition.

[0422] Treatments include, beta blockers, calcium channel blockers, heart rhythm drugs such as amiodarone (Pacerone) or disopyramide (Norpace), and blood thinners such as warfarin (Coumadin, Jantoven), dabigatran (Pradaxa), rivaroxaban (Xarelto) or apixaban (Eliquis). Surgeries or other procedures include apical myectomy, septal myectomy, septal ablation, and implantable cardioverter-defibrillator (ICD).

[0423] “Atrial fibrillation” (“AFIB”) is when the atria beat chaotically and irregularly—out of coordination with the ventricles. The result is a fast and irregular heart rhythm. The heart rate in atrial fibrillation may range from 100 to 175 beats a minute. The normal range for a heart rate is 60 to 100 beats a minute.

[0424] Episodes of atrial fibrillation may come and go, or may go away and may require treatment. Although atrial fibrillation itself usually isn't life-threatening, it is a serious medical condition that sometimes requires emergency treatment.

[0425] A major concern with atrial fibrillation is the potential to develop blood clots within the atria which may circulate to other organs and lead to blocked blood flow (ischemia).

[0426] Causes of AFIB include, abnormalities or damage to the heart's structure, high blood pressure, heart attack, coronary artery disease, abnormal heart valves, congenital heart defects, an overactive thyroid gland or other metabolic imbalance, exposure to stimulants, such as medications, caffeine, tobacco or alcohol, sick sinus syndrome—improper functioning of the heart's natural pacemaker, lung diseases, previous heart surgery, viral infections, stress due to surgery, pneumonia or other illnesses, and sleep apnea.

[0427] Symptoms include palpitations, which are sensations of a racing, uncomfortable, irregular heartbeat or a flip-flopping in the chest, weakness, reduced ability to exercise, fatigue, lightheadedness, dizziness, shortness of breath, and chest pain.

[0428] Treatments include, electrical cardioversion, anti-arrhythmics, digoxin, beta blockers, calcium channel blockers anticoagulants, catheter ablation, Maze procedure, atrioventricular (AV) node ablation, and left atrial appendage closure.

[0429] “Ventricular fibrillation” (“VFIB”) is a type of abnormal heart rhythm (arrhythmia). During ventricular fibrillation, disorganized heart signals cause the ventricles to twitch (quiver) uselessly. As a result, the heart doesn't pump blood to the rest of the body.

[0430] Ventricular fibrillation is an emergency that requires immediate medical attention. It's the most frequent cause of sudden cardiac death.

[0431] Collapse and loss of consciousness is the most common symptom of ventricular fibrillation. Other symptoms include chest pain, very fast heartbeat (tachycardia), dizziness, nausea, and shortness of breath.

[0432] Risk factors include previous episode of ventricular fibrillation, previous heart attack, a congenital heart defect, heart muscle disease (cardiomyopathy), injuries that cause damage to the heart muscle, such as being struck by lightning, drug misuse, especially with cocaine or methamphetamine, and severe imbalance of potassium or magnesium.

[0433] Treatments include, cardiopulmonary resuscitation (CPR), defibrillation, anti-arrhythmics, an implantable cardioverter-defibrillator (ICD), cardiac ablation, coronary angioplasty and stent placement, and coronary bypass surgery.

[0434] A “myocardial infarction” or “MI” occurs when the flow of blood to the heart is blocked. The blockage is most often a buildup of fat, cholesterol and other substances, which form a plaque in the arteries that feed the heart (coronary arteries).

[0435] Symptoms include pressure, tightness, pain, or a squeezing or aching sensation in the chest or arms that may spread to the neck, jaw or back, nausea, indigestion, heartburn or abdominal pain, shortness of breath, cold sweat, fatigue, lightheadedness or sudden dizziness

[0436] Heart attack risk factors include age (e.g., men age 45 or older and women age 55 or older are more likely to have a heart attack than are younger men and women, tobacco, high blood pressure. Over time, high blood pressure can damage arteries that lead to your heart. High blood pressure that occurs with other conditions, such as obesity, high cholesterol or diabetes, increases your risk even more, high cholesterol or triglyceride levels, obesity, diabetes, metabolic syndrome, family history of heart attacks, lack of physical activity, stress, illicit drug use, a history of preeclampsia, and an autoimmune condition.

[0437] Treatments include, aspirin, thrombolytics, antiplatelet agents, other blood-thinning medications, pain relievers, nitroglycerin, beta blockers, ACE inhibitors, statins, coronary angioplasty and stenting, and coronary artery bypass surgery.

[0438] “Supraventricular tachycardia” (“SVT”) is as an abnormally fast or erratic heartbeat that affects the heart's atria. During an episode of SVT, the heart beats about 150 to 220 times per minute, but it can occasionally beat faster or slower.

[0439] The main symptom of supraventricular tachycardia (SVT) is a very fast heartbeat (100 beats a minute or more) that may last for a few minutes to a few days. The fast heartbeat may come and go suddenly, with stretches of normal heart rates in between.

[0440] Signs and symptoms of supraventricular tachycardia may include very fast (rapid) heartbeat, a fluttering or pounding in the chest (palpitations), a pounding sensation in the neck, weakness or feeling very tired (fatigue), chest pain, shortness of breath, lightheadedness or dizziness, sweating, and fainting (syncope) or near fainting. Some with SVT have no signs or symptoms at all.

[0441] For some, a supraventricular tachycardia episode is related to an obvious trigger, such as exercise, stress or lack of sleep. Some people may not have a noticeable trigger. Things that may cause an SVT episode include age, coronary artery disease, previous heart surgery, heart disease, heart failure, other heart problems, such as Wolff-Parkinson-White syndrome, chronic lung disease, consuming too much caffeine, drinking too much alcohol, drug use, particularly stimulants such as cocaine and methamphetamines, pregnancy, smoking, thyroid disease, tobacco, sleep apnea, diabetes, and certain medications, including asthma medications and over-the-counter cold and allergy drugs.

[0442] Treatments include, carotid sinus massage, vagal maneuvers, cardioversion, beta blockers, anti-arrhythmics, calcium channel blocker, catheter ablation, and pacemaker.

[0443] “Hypertrophic cardiomyopathy” (“HCM”) is a disease in which the heart muscle becomes abnormally thick (hypertrophied). The thickened heart muscle can make it harder for the heart to pump blood.

[0444] “Angina” is a type of chest pain caused by reduced blood flow to the heart. Angina is a symptom of coronary artery disease.

[0445] Angina, also called angina pectoris, is often described as squeezing, pressure, heaviness, tightness or pain in your chest. Some with angina symptoms say angina feels like a vise squeezing their chest or a heavy weight lying on their chest. There may also be pain in the arms, neck, jaw, shoulder or back. Other symptoms that you may have with angina include dizziness, fatigue, nausea, shortness of breath, and sweating.

[0446] Risk factors include tobacco, diabetes, high blood pressure, high cholesterol or triglyceride levels, family history of heart disease, age (e.g., men older than 45 and women older than 55 have a greater risk than do younger adults), lack of exercise, obesity, and stress.

[0447] Treatments include, lifestyle changes, nitrates, aspirin, clot-preventing drugs, beta blockers, statins, calcium channel blockers, blood pressure-lowering medications, angiotensin-converting enzyme (ACE) inhibitors or angiotensin II receptor blockers (ARBs), ranolazine (Ranexa), angioplasty and stenting, coronary artery bypass surgery, and external counterpulsation (ECP).

[0448] Phospholamban (PLN) cardiomyopathy, as used herein, refers to a specific subtype of hereditary cardiomyopathy caused by PLN p.(Arg14del), a pathogenic variant in the gene encoding PLN, which is a protein with a central role in calcium homeostasis in cardiac tissue. This protein ensures proper contraction and relaxation of the human heart. Carriers of this pathogenic variant have a high risk of developing dilated cardiomyopathy (DCM), arrhythmic cardiomyopathy (ACM), or both. They commonly have a high arrhythmic burden, with premature ventricular contractions (PVCs) and ventricular tachycardia, remarkable low-voltage electrocardiograms (ECGs), left ventricular dysfunction, and a positive family history for sudden cardiac death. PLN p.(Arg14del) cardiomyopathy has been found in several European countries, but also in the United States, Canada, and China. On a global scale it is a rare disease, but it is particularly common in The Netherlands, with the pathogenic variant being present in 12% of all ACM patients and 15% of all DCM patients.

[0449] Exemplary skeletal muscle disorders include Myostatin-related muscle hypertrophy, congenital myasthenic syndrome, facioscapulohumeral muscular dystrophy (FSHD), Spinal Muscular Atrophy (SMA), Myotonic Dystrophy Type 1 (DM1), Pompe disease, PLN cardiomyopathy, and spasticity.

[0450] Myostatin-related muscle hypertrophy is a rare condition characterized by reduced body fat and increased muscle size. Affected individuals have up to twice the usual amount of muscle mass in their bodies. They also tend to have increased muscle strength. Myostatin-related muscle hypertrophy is caused by mutations in the MSTN gene. It follows an incomplete autosomal dominant pattern of inheritance.

[0451] Congenital myasthenic syndromes (CMS) are a heterogeneous group of early-onset genetic neuromuscular transmission disorders due to mutations in proteins involved in the organisation, maintenance, function, or modification of the motor endplate (endplate myopathies), e.g., CHRNA1, CHRNB1, CHRBD, CHRNE, CHRNG, COL13A1, DOX7, LRP4, MUSK, RAPSN, or SCN4A. CMS are clinically characterised by abnormal fatigability, or transient or permanent weakness of extra-ocular, facial, bulbar, truncal, respiratory, or limb muscles. Onset of endplate myopathy is intrauterine, congenital, in infancy, or childhood, and rarely in adolescence. Severity ranges from mild, phasic weakness, to disabling, permanent muscle weakness, respiratory insufficiency, and early death. All subtypes of CMS share the clinical features of fatigability and muscle weakness, but age of onset, presenting symptoms, and response to treatment vary depending on the molecular mechanism that results from the underlying genetic defect. The term CMS is misleading since not all CMS are congenital. See, Finsterer (2019) Orphanet J Rare Dis. 14: 57 for a review.

[0452] Facioscapulohumeral muscular dystrophy (FSHD) type 1 is an autosomal dominant condition caused by mutations in DUX4. FSHD typically presents before age 20 years with weakness of the facial muscles and the stabilizers of the scapula or the dorsiflexors of the foot. There is extreme clinical variability. In some cases, Congenital facial weakness may be present. In FSHD, the muscle weakness is slowly progressive and approximately 20% of affected individuals eventually require a wheelchair. Life expectancy is not shortened. The incidence is approximately 4 individuals affected per 100,000 people.

[0453] Spinal muscular atrophy, as used herein, refers to a genetic disorder characterized by weakness and wasting (atrophy) in muscles used for movement (skeletal muscles). It is caused by a loss of specialized nerve cells, called motor neurons that control muscle movement. The weakness tends to be more severe in the muscles that are close to the center of the body (proximal) compared to muscles away from the body's center (distal). The muscle weakness usually worsens with age. There are many types of spinal muscular atrophy that are caused by changes in the same genes. The types differ in age of onset and severity of muscle weakness; however, there is overlap between the types. Other forms of spinal muscular atrophy and related motor neuron diseases, such as spinal muscular atrophy with progressive myoclonic epilepsy, spinal muscular atrophy with lower extremity predominance, X-linked infantile spinal muscular atrophy, and spinal muscular atrophy with respiratory distress type 1 are caused by mutations in other genes.

[0454] Mutations in the SMN1 gene cause all types of spinal muscular atrophy described above. The number of copies of the SMN2 gene modifies the severity of the condition and helps determine which type develops. The SMN1 and SMN2 genes both provide instructions for making a protein called the survival motor neuron (SMN) protein. Normally, most functional SMN protein is produced from the SMN1 gene, with a small amount produced from the SMN2 gene. Several different versions of the SMN protein are produced from the SMN2 gene, but only one version is functional; the other versions are smaller and quickly broken down. The SMN protein is one of a group of proteins called the SMN complex, which is important for the maintenance of motor neurons. Motor neurons transmit signals from the brain and spinal cord that tell skeletal muscles to tense (contract), which allows the body to move.

[0455] Myotonic dystrophy, as used herein, refers to a part of a group of inherited disorders called muscular dystrophies. It is the most common form of muscular dystrophy that begins in adulthood. Myotonic dystrophy is characterized by progressive muscle wasting and weakness. People with this disorder often have prolonged muscle contractions (myotonia) and are not able to relax certain muscles after use. Other signs and symptoms of myotonic dystrophy include clouding of the lens of the eye (cataracts) and abnormalities of the electrical signals that control the heartbeat (cardiac conduction defects). Some affected individuals develop a condition called diabetes mellitus, in which blood sugar levels can become dangerously high. The features of myotonic dystrophy often develop during a person's twenties or thirties, although they can occur at any age. The severity of the condition vanes widely among affected people, even among members of the same family. There are two major types of myotonic dystrophy: type 1 and type 2. Their signs and symptoms overlap, although type 2 tends to be milder than type 1. The muscle weakness associated with type 1 particularly affects muscles farthest from the center of the body (distal muscles), such as those of the lower legs, hands, neck, and face. Muscle weakness in type 2 primarily involves muscles close to the center of the body (proximal muscles), such as the those of the neck, shoulders, elbows, and hips. The two types of myotonic dystrophy are caused by mutations in different genes.

[0456] Myotonic dystrophy type 1 is caused by mutations in the DMPK gene, while type 2 results from mutations in the CNBP gene. The protein produced from the DMPK gene likely plays a role in communication within cells. It appears to be important for the correct functioning of cells in the heart, brain, and skeletal muscles (which are used for movement). The protein produced from the CNBP gene is found primarily in the heart and in skeletal muscles, where it helps regulate the function of other genes. Similar changes in the structure of the DMPK and CNBP genes cause myotonic dystrophy type 1 and type 2. In each case, a segment of DNA is abnormally repeated many times, forming an unstable region in the gene. The gene with the abnormal segment produces an unusually long messenger RNA, which is a molecular blueprint of the gene that guides the production of proteins. The unusually long messenger RNA forms clumps inside the cell that interfere with the production of many other proteins. These changes prevent muscle cells and cells in other tissues from functioning normally, which leads to the signs and symptoms of myotonic dystrophy. If these changes affect the DMPK gene, the result is myotonic dystrophy type 1, if the CNBP gene is affected, the result is myotonic dystrophy type 2.

[0457] Pompe disease, as used herein, refers to an inherited disorder caused by the buildup of a complex sugar called glycogen in the body's cells. The accumulation of glycogen in certain organs and tissues, especially muscles, impairs their ability to function normally. There are three types of Pompe disease, which differ in severity and the age at which they appear. These types are known as classic infantile-onset, non-classic infantile-onset, and late-onset. The classic form of infantile-onset Pompe disease begins within a few months of birth. Infants with this disorder typically experience muscle weakness (myopathy), poor muscle tone (hypotonia), an enlarged liver (hepatomegaly), and heart defects. Affected infants may also fail to gain weight and grow at the expected rate (failure to thrive) and have breathing problems. If untreated, this form of Pompe disease leads to death from heart failure in the first year of life. The non-classic form of infantile-onset Pompe disease usually appears by age 1. It is characterized by delayed motor skills (such as rolling over and sitting) and progressive muscle weakness. The heart may be abnormally large (cardiomegaly), but affected individuals usually do not experience heart failure. The muscle weakness in this disorder leads to serious breathing problems, and most children with non-classic infantile-onset Pompe disease live only into early childhood. The late-onset type of Pompe disease may not become apparent until later in childhood, adolescence, or adulthood. Late-onset Pompe disease is usually milder than the infantile-onset forms of this disorder and is less likely to involve the heart. Most individuals with late-onset Pompe disease experience progressive muscle weakness, especially in the legs and the trunk, including the muscles that control breathing. As the disorder progresses, breathing problems can lead to respiratory failure.

[0458] Mutations in the GAA gene cause Pompe disease. The GAA gene provides instructions for producing an enzyme called acid alpha-glucosidase (also known as acid maltase). This enzyme is active in lysosomes, which are structures that serve as recycling centers within cells. The enzyme normally breaks down glycogen into a simpler sugar glucose, which is the main energy source for most cells. Mutations in the GAA gene prevent acid alpha-glucosidase from breaking down glycogen effectively, which allows this sugar to build up to toxic levels in lysosomes. This buildup damages organs and tissues throughout the body, particularly the muscles, leading to the progressive signs and symptoms of Pompe disease.

[0459] Spasticity, as used herein, refers to a condition in which muscles stiffen or tighten, preventing normal fluid movement. The muscles remain contracted and resist being stretched, thus affecting movement, speech and gait. Spasticity is generally caused by damage or disruption to the area of the brain and spinal cord that are responsible for controlling muscle and stretch reflexes. These disruptions can be due to an imbalance in the inhibitory and excitatory signals sent to the muscles, causing them to lock in place. Spasticity can be harmful to growing children as it can affect muscles and joints. People with brain injury, spinal cord injury, cerebral palsy or multiple sclerosis can have varying degrees of spasticity.

[0460] “Therapeutically effective amount,” as used herein, is intended to include the amount of an RNAi agent that, when administered to a subject having a target gene-associated disease, is sufficient to effect treatment of the disease (e.g., by diminishing, ameliorating, or maintaining the existing disease or one or more symptoms of disease). The “therapeutically effective amount” may vary depending on the RNAi agent, how the agent is administered, the disease and its severity and the history, age, weight, family history, genetic makeup, the types of preceding or concomitant treatments, if any, and other individual characteristics of the subject to be treated.

[0461] “Prophylactically effective amount,” as used herein, is intended to include the amount of a RNAi agent that, when administered to a subject having a target gene-associated disorder, e.g., gout or diabetes, is sufficient to prevent or ameliorate the disease or one or more symptoms of the disease. Ameliorating the disease includes slowing the course of the disease or reducing the severity of later-developing disease. The “prophylactically effective amount” may vary depending on the RNAi agent, how the agent is administered, the degree of risk of disease, and the history, age, weight, family history, genetic makeup, the types of preceding or concomitant treatments, if any, and other individual characteristics of the patient to be treated.

[0462] A “therapeutically-effective amount” or “prophylactically effective amount” also includes an amount of a RNAi agent that produces some desired local or systemic effect at a reasonable benefit/risk ratio applicable to any treatment. A RNAi agent employed in the methods of the present disclosure may be administered in a sufficient amount to produce a reasonable benefit/risk ratio applicable to such treatment.

[0463] The phrase “pharmaceutically acceptable” is employed herein to refer to those compounds, materials, compositions, or dosage forms which are, within the scope of sound medical judgment, suitable for use in contact with the tissues of human subjects and animal subjects without excessive toxicity, irritation, allergic response, or other problem or complication, commensurate with a reasonable benefit/risk ratio.

[0464] The phrase “pharmaceutically-acceptable carrier” as used herein means a pharmaceutically-acceptable material, composition or vehicle, such as a liquid or solid filler, diluent, excipient, manufacturing aid (e.g., lubricant, talc magnesium, calcium or zinc stearate, or steric acid), or solvent encapsulating material, involved in carrying or transporting the subject compound from one organ, or portion of the body, to another organ, or portion of the body. Each carrier must be “acceptable” in the sense of being compatible with the other ingredients of the formulation and not injurious to the subject being treated. Some examples of materials which can serve as pharmaceutically-acceptable carriers include: (1) sugars, such as lactose, glucose and sucrose; (2) starches, such as corn starch and potato starch; (3) cellulose, and its derivatives, such as sodium carboxymethyl cellulose, ethyl cellulose and cellulose acetate; (4) powdered tragacanth; (5) malt; (6) gelatin; (7) lubricating agents, such as magnesium state, sodium lauryl sulfate and talc; (8) excipients, such as cocoa butter and suppository waxes; (9) oils, such as peanut oil, cottonseed oil, safflower oil, sesame oil, olive oil, corn oil and soybean oil; (10) glycols, such as propylene glycol; (11) polyols, such as glycerin, sorbitol, mannitol and polyethylene glycol; (12) esters, such as ethyl oleate and ethyl laurate; (13) agar; (14) buffering agents, such as magnesium hydroxide and aluminum hydroxide; (15) alginic acid; (16) pyrogen-free water; (17) isotonic saline; (18) Ringer's solution; (19) ethyl alcohol; (20) pH buffered solutions; (21) polyesters, polycarbonates or polyanhydrides; (22) bulking agents, such as polypeptides and amino acids (23) serum component, such as serum albumin, HDL and LDL; and (22) other non-toxic compatible substances employed in pharmaceutical formulations. Pharmaceutically acceptable carriers for pulmonary delivery are known in the art and will vary depending on the desired location for deposition of the agent, e.g., upper or lower respiratory system, and the type of device to be used for delivery, e.g., sprayer, nebulizer, dry powder inhaler.

[0465] “Pharmaceutically acceptable salts” of each of RNAi agents herein include, but are not limited to, a sodium salt, a calcium salt, a lithium salt, a potassium salt, an ammonium salt, a magnesium salt, an mixtures thereof. One skilled in the art will appreciate that the RNAi agent, when provided as a polycationic salt having one cation per free acid group of the optionally modified phosphodiester backbone and/or any other acidic modifications (e.g., 5′-terminal phosphonate groups). For example, an oligonucleotide of “n” nucleotides in length contains n−1 optionally modified phosphodiesters, so that an oligonucleotide of 21 nt in length may be provided as a salt having up to 20 cations (e.g., 20 sodium cations). Similarly, an RNAi agents having a sense strand of 21 nt in length and an antisense strand of 23 nt in length may be provided as a salt having up to 42 cations (e.g., 42 sodium cations). In the preceding example, where the RNAi agent also includes a 5′-terminal phosphate or a 5′-terminal vinylphosphonate group, the RNAi agent may be provided as a salt having up to 44 cations (e.g., 44 sodium cations).

[0466] The term “sample,” as used herein, includes a collection of similar fluids, cells, or tissues isolated from a subject, as well as fluids, cells, or tissues present within a subject. Examples of biological fluids include blood, serum and serosal fluids, plasma, bronchial fluids, sputum, cerebrospinal fluid, ocular fluids, lymph, urine, saliva, sputum, and the like. Tissue samples may include samples from tissues, organs or localized regions. For example, samples may be derived from particular organs, parts of organs, or fluids or cells within those organs.

### II. Modified Alpha-v-Beta-6 (αvβ6) Integrin Compounds and Ligands

[0467] Integrins are cell surface receptors that, upon ligand binding, activate signal transduction pathways including signaling pathways involved in cytoskeleton organization and cell cycle regulation. Integrins are also involved in cell attachment to the extracellular matrix and the integrin ligands comprise common extracellular matrix components, including fibronectin, collagen, laminin, fibrinogen, thrombospondin, and glycoproteins (e.g., tenascin C, osteopontin, and nefronectin). In humans there are at least twenty-four known integrin heterodimers composed of an alpha and a beta subunit, e.g., αvβ6. It is the combination of the alpha and beta subunits which determines the ligand specificity and function of the integrin. Nearly all cells express at least one integrin and the expression and/or activity of integrins can be influenced by other signal inducing molecules, such as cytokines or steroids.

[0468] The main function of αvβ6 is the activation of cytokine transforming growth factor-b1 (TGF-β1). Latent-TGF-β1 is bound to the extracellular matrix, covered by its pro-peptide latency associated peptide (LAP). αvβ6 binds LAP, and through cytoskeletal force releases TGF-β1. TGF-β1 regulates multiple processes including cell proliferation, differentiation, angiogenesis, epithelial-mesenchymal-transition (EMT) and immune suppression. These processes combine to heal wounds but when uncontrolled can promote tissue pathologies.

[0469] The present invention provides αvβ6 compounds and ligands comprising such αvβ6 compounds that can be conjugated to, e.g., a dsRNA agent, for efficient extrahepatic delivery of the dsRNA agent.

A. Alpha-v-Beta-6 (αvβ6) Integrin Compounds

[0470] In one aspect, the present application provides modified integrin-modifying compounds in a form suitable for conjugation to an oligonucleotide, either directly or via a carrier group. In some embodiments, the present disclosure provides a compound of the Formula (IV),

[chemical structure]

or a salt thereof, wherein:
[0471] Y is O, N(H), S, or CH₂; (e.g., O or CH₂)
[0472] R¹ is hydrogen or C₁₋₆alkyl (e.g., methyl);
[0473] R^{Y} is

[chemical structure]

wherein
   [0474] m is 0, 1, 2, 3, or 4; and
   [0475] each R² is independently R, or two R² groups on adjacent carbon atoms taken together with the atoms to which they are bound form a fused 4-8 membered ring that is optionally substituted by 1, 2, 3 or 4 groups independently selected from group consisting of R and a nitrogen protecting group;
[0476] and
[0477] R^{L} is —N(R³)(R⁴), —O(R⁵), —S(R⁵), or —R⁵, wherein
   [0478] R³ and R⁴ are either
      [0479] (i) R³ is hydrogen or C₁₋₆alkyl and R⁴ is R⁵; or
      [0480] (ii) R³ and R⁴ taken together with the nitrogen atom to which they are attached form a 4-8 membered monocyclic heterocyclyl group that is substituted with R⁵;
   [0481] and
   [0482] R⁵ is -L-Z wherein
      [0483] L is -L¹-[G-L²]_{q}-G-L³-*, wherein
         [0484] * is the bond to Z;
         [0485] q is 0 or an integer selected from 1-25; (e.g., 1-20, or 1-15);
         [0486] L¹ is a bond or -B-A-;
         [0487] each L² is independently -A-B-A-;
         [0488] L³ is a bond or -A-B-A-;
         [0489] each G is independently -D-E-F-, wherein D, E, and F are independently a bond, C₁₋₁₀alkyl, C₂₋₁₀alkenyl, C₂₋₁₀alkynyl, C₃₋₁₀cycloalkyl, 3-10 membered heterocyclyl, aryl, or heteroaryl, each of which is optionally substituted with 1, 2, 3, or 4 R groups;
         [0490] each A is independently a bond, —O—, —S—, or —N(R^{N})—.
         [0491] each B is independently a bond, CH₂, C(O), C(S), C(NR^{N}), (O), S(O)₂, P(O)(OH), P(S)(OH), or P(S)(SH);
         [0492] each R^{N} is independently hydrogen or C₁₋₆alkyl, or two R^{N} within an -A-B-A- group taken together with the atoms to which they are connected from a 4-8 membered heterocyclyl;
         [0493] and
      [0494] Z is one member of a reactive pair;
[0495] and
[0496] each R group is independently selected from the group consisting of R′, C₁₋₆alkyl, C₁₋₆ haloalkyl, C₂₋₆alkenyl, C₂₋₆alkynyl, C₃₋₈cycloalkyl, heterocyclyl, aryl, heteroaryl, C₃₋₈cycloalkylC₁₋₆alkyl, heterocyclylC₁₋₆alkyl, aryl C₁₋₆alkyl, heteroarylC₁₋₆alkyl, each of which, other than R′, is optionally substituted with 1, 2, or 3 R′ groups, wherein
   [0497] each R′ is independently halogen, cyano, azido, nitro, —N(R^{b})₂, —O(R^{a}), —S(R⁰), —C(O)OR⁰,
   [0498] C(O)R⁰, —C(O)N(R⁰)₂, —C(NR⁰)OR, —C(NR⁰)R⁰, —C(NR⁰)N(R⁰)₂, —C(S)OR⁰, —C(S)R⁰, —C(S)N(R⁰)₂, —S(O)₂R⁰, —S(O)₂OR⁰, —S(O)₂N(R⁰)₂, —N(R⁰)C(O)OR⁰, —N(R⁰)C(O)R⁰, —N (R⁰)C(O)N(R⁰)₂, —N(R⁰)S(O)₂R⁰, —N(R⁰)S(O)₂OR⁰, —N(R⁰)S(O)₂N(R⁰)₂, —OC(O)OR⁰, —OC(O)R⁰, —OC(O)N(R⁰)₂, —OS(O)₂R⁰, —OS(O)₂OR⁰, —OS(O)₂N(R⁰)₂, or —SC(O)R⁰, wherein
      [0499] each R⁰ is independently hydrogen or C₁₋₆alkyl; each R^{a} is independently hydrogen, C₁₋₆alkyl, or a hydroxyl protecting group; and each R^{b} is independently hydrogen, C₁₋₆alkyl, or a nitrogen protecting group
[0500] provided that in each -D-E-F- group, at least one of D, E, and F is not a bond; and R^{L} is not N-morpholinyl.

[0501] In some embodiments, in —N(R³)(R⁴), R³ and R⁴ do not form a morpholino ring.

[0502] In some embodiments, in each -A-B-A- group, B is only a bond when one of the A groups is not a bond.

[0503] In some embodiments, each R group is independently selected from the group consisting of R′, C₁₋₆alkyl, C₁₋₆haloalkyl, C₂₋₆alkenyl, C₂₋₆alkynyl, C₃₋₈cycloalkyl, heterocyclyl, aryl, heteroaryl, C₃₋₈cycloalkylC₁₋₆alkyl, heterocyclylC₁₋₆alkyl, aryl C₁₋₆alkyl and heteroaryl₁₋₆alkyl, each of which, other than R′, is optionally substituted with 1, 2, or 3 R′ groups, wherein each R′ is independently halogen, cyano, azido, nitro, —N(R^{b})₂, —O(R^{a}), —S(R⁰), —C(O)OR⁰, —C(O)R⁰, —C(O)N(R⁰)₂, —N(R⁰)C(O)R⁰, —OC(O)OR⁰, or —OC(O)R⁰, wherein each R⁰ is independently hydrogen or C₁₋₆alkyl; each R^{a} is independently hydrogen, C₁₋₆alkyl, or a hydroxyl protecting group; and each R^{b} is independently hydrogen, C₁₋₆alkyl, or a nitrogen protecting group.

[0504] In some embodiments, each R group is independently selected from the group consisting of R′, C₁₋₆alkyl, C₁₋₆haloalkyl, C₂₋₆alkenyl, C₂₋₆alkynyl, C₃₋₆cycloalkyl, 5-6 membered heterocyclyl, phenyl, 5-6 membered heteroaryl, and benzyl, each of which, other than R′, is optionally substituted with 1, 2, or 3 R′ groups, wherein each R′ is independently halogen, cyano, azido, nitro, —N(R^{b})₂, —O(R^{a}), —S(R⁰), —C(O)OR⁰, —C(O)R⁰, —C(O)N(R⁰)₂, —N(R⁰)C(O)R⁰, —OC(O)OR, or —OC(O)R⁰, wherein each R⁰ is independently hydrogen or C₁₋₆alkyl; each R^{a} is independently hydrogen, C₁₋₆alkyl, or a hydroxyl protecting group; and each R^{b} is independently hydrogen, C₁₋₆alkyl, or a nitrogen protecting group.

[0505] In some embodiments, each R group is independently selected from the group consisting of R′, C₁₋₆alkyl, C₃₋₆cycloalkyl, 5-6 membered heterocyclyl, phenyl, 5-6 membered heteroaryl, and benzyl, each of which, other than R′, is optionally substituted with 1, 2, or 3 R′ groups, wherein each R′ is independently halogen, cyano, azido, nitro, —N(R^{b})₂, —O(R^{a}), —S(R⁰), —C(O)OR⁰, —C(O)R⁰, —C(O)N(R⁰)₂, —N(R⁰)C(O)R⁰, —OC(O)OR⁰, or —OC(O)R⁰, wherein each R⁰ is independently hydrogen or C₁₋₆alkyl; each R^{a} is independently hydrogen, C₁₋₆alkyl, or a hydroxyl protecting group; and each R^{b} is independently hydrogen, C₁₋₆alkyl, or a nitrogen protecting group.

R^{Y} Embodiments, Formulae (IV) and (IV-a) through (IV-b)

[0506] In some embodiments of any one of Formula (IV) and Formulae (IV-a) through (IV-b), in R^{Y}, each R² is independently R as defined in Formula (IV).

[0507] In some embodiments, R^{Y} is

[chemical structure]

(or its tautomer,

[chemical structure]

[0508] In some embodiments, R^{Y} is

[chemical structure]

[0509] In some embodiments, in R^{Y}, two R² groups on adjacent carbon atoms taken together with the atoms to which they are bound form a fused 4-8 membered ring that is optionally substituted with 1, 2, 3 or 4 groups independently selected from group consisting of R and a nitrogen protecting group, wherein R is as defined in Formula (IV).

[0510] In some embodiments, R^{Y} is

[chemical structure]

wherein p is 0, 1, 2, 3 or 4; and each R²¹ is independently selected from group consisting of R and a nitrogen protecting group, wherein R is as defined in Formula (IV).

[0511] In some embodiments, R^{Y} is

[chemical structure]

wherein p is 0, 1, 2, 3 or 4; and each R²¹ is independently selected from the group consisting of R and a nitrogen protecting group, wherein R is as defined in Formula (IV).

[0512] In some embodiments, R^{Y} is

[chemical structure]

[0513] In some embodiments, R^{Y} is

[chemical structure]

wherein R^{P} is a nitrogen protecting group.

[0514] In some embodiments, R^{Y} is

[chemical structure]

wherein R^{P} is a nitrogen protecting group.

[0515] In some embodiments, R^{Y} is

[chemical structure]

wherein R^{P} is a nitrogen protecting group.

[0516] In some embodiments, R^{Y} is

[chemical structure]

[0517] In some embodiments, R^{Y} is

[chemical structure]

wherein R^{P} is a nitrogen protecting group.

[0518] In some embodiments, the compound of Formula (IV) is according to Formula (IV-a) through IV-h):

[chemical structure]

[chemical structure]

wherein p is 0, 1, 2 or 3;
[0519] each R²¹ is independently selected from group consisting of R and a nitrogen protecting group, and R^{P} is a hydrogen or a nitrogen protecting group, and
[0520] R is as defined above.
   L Embodiments, Formula (IV) and (IV-a) through (IV-r)

[0521] In some embodiments of any one of Formula (IV) and Formulae (IV-a) through (IV-r), L is -L¹-[G-L²]_{q}-G-L³-*, wherein * is the bond to Z.

[0522] In another embodiment, wherein L is -L¹-[G-L²]_{q}-G-L³-*, wherein q is 0, 1, 2, 3, 4, or 5.

[0523] In another embodiment, L is -L¹-[G-L²]_{q}-G-L³-*, wherein q is 0, 1, 2, 3, or 4

[0524] In another embodiment, L is -L¹-[G-L²]_{q}-G-L³-*, wherein q is 0, 1, 2, or 3.

[0525] In another embodiment, L is -L¹-[G-L²]_{q}-G-L³-*, wherein q is 0, 1, or 2.

[0526] In another embodiment, L is -L¹-[G-L²]_{q}-G-L³-*, wherein q is 1, 2, 3, 4, or 5.

[0527] In another embodiment, L is -L¹-[G-L²]_{q}-G-L³-*, wherein q is 1, 2, 3, or 4.

[0528] In another embodiment, L is -L¹-[G-L²]_{q}-G-L³-*, wherein q is 1, 2, or 3.

[0529] In another embodiment, L is -L¹-[G-L²]_{q}-G-L³-*, wherein q is 1 or 2.

[0530] In another embodiment, L is -L¹-[G-L²]_{q}-G-L³-*, wherein q is 4. In another embodiment, L is -L¹-[G-L²]_{q}-G-L³-*, wherein q is 3. In another embodiment, L is -L¹-[G-L²]_{q}-G-L³-*, wherein q is 2.

[0531] In another embodiment, L is -L¹-G-L²-G-L³-*. In another embodiment nts, L is -L¹-G-L³-*.

[0532] In another embodiment, L is -G-L³-*. In another embodiment, L is -L¹-G-*. In another embodiment, L is -G-*.

[0533] In some embodiments, each instance of A-B-A- is independently selected from the group consisting of —C(O)O—, —OC(O)—, —C(O)N(R^{N})—, —N(R^{N})C(O)—, —OC(O)O—, —OC(O)N(R^{N})—, —N(R^{N})C(O)O—, —N(R^{N})C(O)N(R^{N})—, —OP(O)(OH)O—, —OP(S)(OH)O—, —O—, and —N(R^{N})—, wherein each R^{N} is independently hydrogen or C₁₋₆alkyl.

[0534] In some embodiments, each instance of A-B-A- is independently selected from the group consisting of —C(O)O—, —OC(O)—, —C(O)N(R^{N})—, —N(R^{N})C(O)—, —OC(O)N(R^{N})—, —N(R^{N})C(O)O—, —N(R^{N})C(O)N(R^{N})—, —O—, and —N(R^{N})—, wherein each R^{N} is independently hydrogen or C₁₋₆alkyl.

[0535] In some embodiments, each instance of A-B-A- is independently selected from the group consisting of —C(O)N(R^{N})—, —N(R^{N})C(O)—, —OC(O)N(R^{N})—, —N(R^{N})C(O)O—, —N(R^{N})C(O)N(R^{N})—, —O—, and —N(R^{N})—, wherein each R^{N} is independently hydrogen or C₁₋₆alkyl.

[0536] In some embodiments, each instance of A-B-A- is independently selected from the group consisting of —C(O)O—, —OC(O)—, —C(O)N(R^{N})—, —N(R^{N})C(O)—, —O—, and —N(R^{N})—, wherein each R^{N} is independently hydrogen or C₁₋₆alkyl.

[0537] In some embodiments, each instance of A-B-A- is independently selected from the group consisting of —C(O)N(R^{N})—, —N(R^{N})C(O)—, —O—, and —N(R^{N})—, wherein each R^{N} is independently hydrogen or C₁₋₆alkyl.

[0538] In some embodiments,
[0539] D and F are each independently a bond, C₁₋₁₀alkyl, C₂₋₁₀alkenyl, or C₂₋₁₀alkynyl, each optionally substituted with 1, 2, 3, or 4 R groups; and
[0540] E is C₁₋₁₀alkyl, C₂₋₁₀alkenyl, C₂₋₁₀alkynyl, C₃₋₁₀cycloalkyl, 3-10 membered heterocyclyl, aryl, or heteroaryl, each of which is optionally substituted with 1, 2, 3, or 4 R groups.

[0541] In some embodiments,
[0542] D and F are each independently a bond or C₁₋₁₀alkyl optionally substituted with 1, 2, 3, or 4 R groups; and
[0543] E is C₁₋₁₀alkyl, C₂₋₁₀alkenyl, C₂₋₁₀alkynyl, C₃₋₁₀cycloalkyl, 3-10 membered heterocyclyl, aryl, or heteroaryl, each of which is optionally substituted with 1, 2, 3, or 4 R groups.

[0544] In some embodiments, each G is independently C₁₋₁₀alkyl, C₂₋₁₀alkenyl, C₂₋₁₀alkynyl, C₃₋₁₀cycloalkyl, 3-10 membered heterocyclyl, aryl, or heteroaryl, each of which is optionally substituted with 1, 2, 3, or 4 R groups.

[0545] In some embodiments, each G is independently C₁₋₁₀alkyl, optionally substituted with 1, 2, or 3 R groups.

[0546] In some embodiments, each G is independently C₁₋₁₀alkyl, optionally substituted with 1 or 2 R groups.

[0547] In some embodiments, each G is independently C₁₋₁₀alkyl, optionally substituted with one R group

[0548] In some embodiments, L is -L1-G-L³-*, wherein * is the bond to Z;
[0549] G is -D-E-F-, wherein D, E, and F are independently a bond, C₁₋₁₀alkyl, C₂₋₁₀alkenyl, C₂₋₁₀alkynyl, C₃₋₁₀cycloalkyl, 3-10 membered heterocyclyl, aryl, or heteroaryl, each of which is optionally substituted with 1, 2, 3, or 4 R groups;
[0550] L¹ is -B-A-;
[0551] L³ is a bond or -A-B-A-;
[0552] each A is independently a bond, —O—, —S—, or —N(R^{N})—, wherein each R^{N} is independently hydrogen or C₁₋₆alkyl.
[0553] each B is independently a bond, CH₂, C(O), S(O)₂, P(O)(OH), or P(S)(OH); and

[0554] In some embodiments, L is -L¹-G-L³-*, wherein * is the bond to Z;
[0555] G is C₁₋₁₀alkyl, C₂₋₁₀alkenyl, C₂₋₁₀alkynyl, C₃₋₁₀cycloalkyl, 3-10 membered heterocyclyl, aryl, or heteroaryl, each of which is optionally substituted with 1, 2, 3, or 4 R groups;
[0556] L¹ is -B-;
[0557] L³ is a bond or -A-B-A-;
[0558] each A is independently a bond, —O—, —S—, or —N(R^{N})—, wherein each R^{N} is independently hydrogen or C₁₋₆alkyl; and
[0559] each B is independently a bond, CH₂, C(O), S(O)₂, P(O)(OH), or P(S)(OH; and
[0560] In some embodiments, L is -L¹-G-*, wherein * is the bond to Z;
[0561] G is C₁₋₁₀alkyl, C₂₋₁₀alkenyl, C₂₋₁₀alkynyl, C₃₋₁₀cycloalkyl, 3-10 membered heterocyclyl, aryl, or heteroaryl, each of which is optionally substituted with 1, 2, 3, or 4 R groups;
[0562] L¹ is -B-A-, wherein,
   [0563] A is a bond, —O—, —S—, or —N(R^{N})—, wherein each R^{N} is independently hydrogen or C₁₋₆ alkyl; and
   [0564] B is a bond, C(O), C(S), S(O)₂, P(O)(OH), or P(S)(OH).

[0565] In some embodiments, L is -L¹-G-*, wherein * is the bond to Z;
[0566] G is C₁₋₁₀alkyl, C₂₋₁₀alkenyl, C₂₋₁₀alkynyl, each of which is optionally substituted with 1 or 2 R groups;
[0567] L¹ is -B-A-, wherein
   [0568] A is a bond, —O—, —S—, or —N(R^{N})—, each R^{N} is independently hydrogen or C₁₋₆alkyl; and
   [0569] B is a bond, C(O), S(O)₂, P(O)(OH), or P(S)(OH).

[0570] In some embodiments L is -L¹-G-*, wherein * is the bond to Z;
[0571] G is C₁₋₁₀alkyl or C₂₋₁₀alkenyl, each of which is optionally substituted with 1 or 2 R groups;
[0572] L¹ is bond, C(O), S(O)₂, P(O)(OH), or P(S)(OH); and
[0573] R^{N} is hydrogen or C₁₋₆alkyl.

[0574] In some embodiments, L is

[chemical structure]

wherein * is the bond to Z; k is an integer from 1 to 10; L¹ is bond, C(O), C(S), C(NR^{N}), S(O)₂, P(O)(OH), or P(S)(OH); and R^{N} is hydrogen or C₁₋₆ alkyl.

[0575] In some embodiments, L is

[chemical structure]

wherein * is the bond to Z; k is an integer from 1 to 10; L¹ is bond, C(O), P(O)(OH), or P(S)(OH).

[0576] In some embodiments, L is

[chemical structure]

wherein * is the bond to Z; k is an integer from 1 to 10; or an integer from 2 to 10; or an integer from 3 to 10; or an integer from 4 to 10; or an integer from 5 to 10; or an integer from 5 to 9; or an integer from 5 to 8; or an integer from 5 to 7.

[0577] In some embodiments, L is

[chemical structure]

wherein * is the bond to Z; t is an integer from 0 to 10 (e.g., an integer from 1 to 5; or 1; or 2; or 3).

[0578] In some embodiments, L is

[chemical structure]

wherein * is the bond to Z, t is an integer from 0 to 10 (e.g., an integer from 1 to 5 or 1; or 2; or 3); a is an integer from 1 to 3; and s and s′ are each independently an integer from 1 to 24 (e.g., an integer from 1 to 16; an integer from 1 to 10; an integer from 3 to 10; an integer from 3 to 7; or an integer from 4 to 6).

[0579] In some embodiments, L is

[chemical structure]

wherein * is the bond to Z; a is 1, 2 or 3; and each s, s′, and s″ independently is an integer from 1 to 24 (e.g., an integer from 1 to 16, an integer from 1 to 10, an integer from 3 to 10, an integer from 3 to 7, or an integer from 4 to 6).

[0580] In some embodiments, L is

[chemical structure]

wherein * is the bond to Z; and s, s′, and s″ are independently is an integer from 1 to 24 (e.g., an integer from 1 to 16, an integer from 1 to 10, an integer from 3 to 10, an integer from 3 to 7, or an integer from 4 to 6).

[0581] In some embodiments, L is

[chemical structure]

wherein * is the bond to Z and each s, s′, and s″ independently is an integer from 1 to 24 (e.g., an integer from 1 to 16, an integer from 1 to 10, an integer from 3 to 10, an integer from 3 to 7, or an integer from 4 to 6)

[0582] In some embodiments, L is

[chemical structure]

wherein * is the bond to Z; s and k are independently is an integer from 1 to 20 (e.g., an integer from 1 to 16, an integer from 1 to 10, an integer from 3 to 10, an integer from 3 to 7 or an integer from 4 to 6); and w is an integer from 1 to 10 (e.g., an integer from 1 to 16, an integer from 1 to 10, an integer from 3 to 10, an integer from 3 to 7 or an integer from 4 to 6).

[0583] In some embodiments, L is

[chemical structure]

wherein * is the bond to Z and w is an integer from 1 to 20 (e.g., an integer from 1 to 16, an integer from 1 to 10, an integer from 3 to 10, an integer from 3 to 7 or an integer from 4 to 6).
R^{L} Embodiments, Formula (IV) and (IV-a) through (IV-h)

[0584] In some embodiments of any one of Formula (IV) and Formulae (IV-a) through (IV-h), R^{L} is —N(R³)(R⁴), wherein R³ is hydrogen or C₁₋₆alkyl and R⁴ is R⁵.

[0585] In some embodiments, R^{L} is —N(R³)(R⁴), wherein R³ is hydrogen and R⁴ is R⁵.

[0586] In some embodiments, R^{L} is —N(R³)(R⁴), wherein R³ is C₁₋₃alkyl and R⁴ is R⁵.

[0587] In some embodiments, R^{L} is —N(R³)(R⁴), wherein R³ is methyl and R⁴ is R⁵.

[0588] In some embodiments, R^{L} is —N(R³)(R⁴), wherein R³ and R⁴ taken together with the nitrogen atom to which they are attached form a 4-8 membered monocyclic heterocyclyl group that is substituted with R⁵.

[0589] In some embodiments, R^{L} is —N(R³)(R⁴), wherein R³ and R⁴ taken together with the nitrogen atom to which they are attached form a 4-8 membered monocyclic heterocyclyl group that is substituted with R⁵, provided that R³ and R⁴ taken together with the nitrogen atom to which they are attached do not form a morpholino group.

[0590] In some embodiments, R^{L} is —N(R³)(R⁴), wherein R³ and R⁴ taken together with the nitrogen atom to which they are attached form a group that is piperidinyl, piperazinyl, pyrrolidinyl, imidazolidinyl, pyrazolidinyl, oxazolidinyl, thiazolidinyl, azetidinyl, pyrrolinyl, imidazolinyl, or pyrazolinyl, each substituted with R⁵.

[0591] In some embodiments, R^{L} is

[chemical structure]

In some embodiments, R^{L} is

[chemical structure]

wherein t is an integer from 0 to 10 (e.g., 0, 1, 2, 3, 4, 5, 6, 7, 8, 9 or 10); a is an integer from 1 to 3 and s and s′ are each independently an integer from 1 to 24 (e.g., an integer from 1 to 16, an integer from 1 to 10, an integer from 3 to 10, an integer from 3 to 7 or an integer from 4 to 6).

[0592] In some embodiments, R^{L} is

[chemical structure]

a is an integer from 1 to 3; and s, s′, and s″ are each independently an integer from 1 to 24 (e.g., an integer from 1 to 16, an integer from 1 to 10, an integer from 3 to 10, an integer from 3 to 7 or an integer from 4 to 6).
In some embodiments, R^{L} is

[chemical structure]

and s, s′, and s″ are independently is an integer from 1 to 24 (e.g., an integer from 1 to 16, an integer from 1 to 10, an integer from 3 to 10, an integer from 3 to 7 or an integer from 4 to 6.

[0593] In some embodiments, R^{L} is

[chemical structure]

wherein s and k are independently is an integer from 1 to 20 (e.g., an integer from 1 to 16, an integer from 1 to 10, an integer from 3 to 10, an integer from 3 to 7 or an integer from 4 to 6); and w is an integer from 1 to 10 (e.g., an integer from 1 to 16, an integer from 1 to 10, an integer from 3 to 10, an integer from 3 to 7 or an integer from 4 to 6).

[0594] In some embodiments, R^{L} is

[chemical structure]

wherein s, s′, and s″ are independently an integer from 1 to 24 (e.g., an integer from 1 to 16, an integer from 1 to 10, an integer from 3 to 10, an integer from 3 to 7 or an integer from 4 to 6); and t is an integer from 1 to 10 (e.g., an integer from 1 to 8, an integer from 1 to 5, an integer from 1 to 3, or 1, or 2, or 3).

[0595] In some embodiments, R^{L} is

[chemical structure]

wherein s is an integer from 1 to 24 (e.g., an integer from 1 to 16, an integer from 1 to 10, an integer from 3 to 10, an integer from 3 to 7 or an integer from 4 to 6).

[0596] In some embodiments, R^{L} is —O(R⁵).

[0597] In some embodiments, R^{L} is

[chemical structure]

wherein s is an integer from 1 to 24 (e.g., an integer from 1 to 16, an integer from 1 to 10, an integer from 3 to 10, an integer from 3 to 7 or an integer from 4 to 6); and t is an integer from 0 to 10 (e.g., an integer from 1 to 8, an integer from 1 to 5, an integer from 1 to 3, or 1, or 2, or 3).

[0598] In some embodiments, R^{L} is —R⁵.

[0599] In some embodiments, R^{L} is

[chemical structure]

wherein s is 1-24 (e.g., an integer from 1 to 16, an integer from 1 to 10, an integer from 3 to 10, an integer from 3 to 7 or an integer from 4 to 6).

[0600] In some embodiments, R^{L} is

[chemical structure]

wherein t is 0 to 10 (e.g., 1-5; or 1-3; or 1; or 2; or 3).

[0601] In some embodiments, R^{L} is

[chemical structure]

[0602] In some embodiments, R^{L} is

[chemical structure]

[chemical structure]

wherein R^{Z} is hydrogen or C₁₋₁₀alkyl, and w is an integer selected from 1-10 (e.g., 2-10, 2-8, 4-8). In some embodiments, R^{Z} is hydrogen or methyl. In some embodiments, R^{Z} is hydrogen. In some embodiments, R^{Z} is methyl.

[0603] In some embodiments, R^{L} is

[chemical structure]

wherein Z is as defined in Formula (IV), and embodiments thereof.

[0604] In some embodiments, R^{L} is

[chemical structure]

Wherein w is an integer selected from 1-10 (e.g., 2-10, 2-8, 4-8), and R^{Z} is as defined in Formula (IV), and embodiments thereof.

[0605] In some embodiments, the compound of Formula (IV) is according to one of Formulae (IV-i) through (IV-1):

[chemical structure]

wherein p is 0, 1, 2, or 3 (e.g., 0); each R²¹ is independently selected from group consisting of R and a nitrogen protecting group, wherein R and the remaining variables are as defined in Formula (IV). In one embodiment of Formulae (IV-i) through (IV-1), R¹ is hydrogen. In another embodiment of Formulae (IV-i) through (IV-1), R¹ is C₁₋₆alkyl (e.g., methyl ort-butyl).

[0606] In some embodiments, the compound of Formula (IV) is according to one of Formulae (IV-m) through (IV-r):

[chemical structure]

[chemical structure]

or a salt thereof, wherein p is 0, 1 or 2; each R²¹ is independently selected from group consisting of R; and R^{P} is hydrogen or a nitrogen protecting group (e.g., a nitrogen protecting group), wherein R and the remaining variables are as defined in Formula (IV). In one embodiment of Formulae (IV-m) through (IV-vr), R¹ is hydrogen. In another embodiment of Formulae (IV-m) through (IV-r), R¹ is C₁₋₆alkyl (e.g., methyl or t-butyl).
Z Embodiments, Formulae (IV) and (IV-a) through (IV-r)

[0607] In some embodiments of any one of Formula (IV) and Formulae (IV-a) through (IV-r), Z is azido, hydroxy, amino, —N═C═O, —N═C═S, —SR^{Z1}, —C(O)H, —C(O)OR^{Z}, —C(S)OR^{Z}, —CH₂—X, or a Michael acceptor,
[0608] wherein R^{Z} is hydrogen or C₁₋₁₀alkyl;
[0609] R^{Z1} is hydrogen, pyridyl, or benzotriazolyl;
[0610] X is a leaving group.

[0611] In some embodiments, Z is COOH.

[0612] In some embodiments, Z is NH₂.

[0613] In some embodiments, Z is N₃.

[0614] In some embodiments, Z is hydroxy.

[0615] In some embodiments, Z is —SH.

[0616] In some embodiments, Z is

[chemical structure]

[0617] In some embodiments, Z is a Michael acceptor (e.g., N-maleimido).

[0618] In some embodiments, Z comprises a terminal alkyne,

[chemical structure]

[0619] In some embodiments, Z comprises

[chemical structure]

such as

[chemical structure]

wherein L⁵³ is a bond, —C(O)—, —C(S)—, —S(O)₂—, —C(O)O—, C(O)N(H)—, —S(O)₂N(H)—.

[0620] In some embodiments, Z comprises

[chemical structure]

[0621] In some embodiments, Z comprises

[chemical structure]

for example, Z is

[chemical structure]

wherein L⁵² is a bond, —O—, —N(H)—, —S—, —C(O)—, —C(S)—, —S(O)₂—, —C(O)O—, —OC(O)—, —C(O)N(H)—, N(H)C(O)—, —OC(O)O—, —OC(O)N(H)—, N(H)C(O)O—, —N(H)C(O)N(H)—, or —S(O)₂N(H)— (e.g.,

[chemical structure]

[0622] In some embodiments, Z comprises

[chemical structure]

[0623] In some embodiments, Z⁰ comprises

[chemical structure]

such as

[chemical structure]

wherein L⁵¹ is a bond, —O—, —N(H)—, —S—, —C(O)—, —C(S)—, —S(O)₂—, —C(O)O—, —OC(O)—, —C(O)N(H)—, N(H)C(O)—, —OC(O)O—, —OC(O)N(H)—, N(H)C(O)O—, —N(H)C(O)N(H)—, —CH₂O—, —CH₂N(H)—, —CH₂S—, —CH₂C(O)O—, —CH₂OC(O)—, —CH₂C(O)N(H)—, —CH₂N(H)C(O)—, —CH₂OC(O)O—, —CH₂OC(O)N(H)—, —CH₂N(H)C(O)O—, —CH₂N(H)C(O)N(H)—, or —S(O)₂N(H)—

[chemical structure]

[0624] In some embodiments, Z comprises

[chemical structure]

for example, Z is R^{Z} is

[chemical structure]

wherein R^{Z10} is hydrogen or C₁₋₁₀alkyl; and L⁵⁰ is a bond, —O—, —N(H)—, —S—, —C(O)—, —C(S)—, —S(O)₂—, —C(O)O—, —OC(O)—, —C(O)N(H)—, N(H)C(O)—, —OC(O)O—, —OC(O)N(H)—, N(H)C(O)O—, —N(H)C(O)N(H)—, —CH₂O—, —CH₂N(H)—, —CH₂S—, —CH₂C(O)O—, —CH₂OC(O)—, —CH₂C(O)N(H)—, —CH₂N(H)C(O)—, —CH₂OC(O)O—, —CH₂OC(O)N(H)—, —CH₂N(H)C(O)O—, —CH₂N(H)C(O)N(H)—, or —S(O)₂N(H)—.

[0625] In some embodiments, Z is an activated ester (e.g.,

[chemical structure]

[0626] In some embodiments, Z is

[chemical structure]

[0627] In some embodiments, Z is

[chemical structure]

[0628] In some embodiments, Z is

[chemical structure]

[0629] In some embodiments, Z is

[chemical structure]

[0630] In some embodiments, Z is

[chemical structure]

R^{P} Embodiments, Formula (IV) and (IV-a) through (IV-r)

[0631] In some embodiments of any one of Formula (IV) and Formulae (IV-a) through (IV-r), R^{P} is

[chemical structure]

wherein r is 1, 2, or 3; each R² is independently halogen, nitro, cyano, C₁₋₄ alkoxy, C₁₋₄alkyl, C₁₋₄haloalkyl; and each R^{P3} is independently hydrogen, methyl, or ethyl.

[0632] In some embodiments, when present, R^{P} is methoxyacetyl (mac), phenoxyacetyl (pac), 2-chlorophenoxyacetyl, 3-chlorophenoxyacetyl, 4-chlorophenoxyacetyl, 2,4-dichlorophenoxyacetyl, 2-methylphenoxyacetyl, 3-methylphenoxyacetyl, 4-methylphenoxyacetyl, 4-chloro-2-methylphenoxyacetyl, 2-nitrophenoxyacetyl, 3-nitrophenoxyacetyl, 4-nitrophenoxyacetyl, 2-isopropylphenoxyacetyl, 3-isopropylphenoxyacetyl, 4-isopropylphenoxyacetyl, 2-(t-butyl)phenoxyacetyl, 3-(t-butyl)phenoxyacetyl, 4-(t-butyl)phenoxyacetyl, 2-fluorophenoxyacetyl, 3-fluorophenoxyacetyl, 4-fluorophenoxyacetyl, 2,4-difluorophenoxyacetyl, 4-(trifluoromethoxy)phenoxyacetyl, 2-phenoxypropanoyl, 2-(4-chloro-2-methylphenoxy)propanoyl, or 2-(4-chlorophenoxy)propanoyl.

[0633] In some embodiments, when present, R^{P} is methoxyacetyl (mac), phenoxyacetyl (pac), 2-chlorophenoxyacetyl, 4-chlorophenoxyacetyl, 2-methylphenoxyacetyl, 4-methylphenoxyacetyl, or 4-isopropylphenoxyacetyl.

[0634] In some embodiments, when present, R^{P} is methoxyacetyl (mac).

[0635] In some embodiments, when present, R^{P} is phenoxyacetyl (pac).

[0636] In some embodiments, when present, R¹ is C₁₋₆alkyl and R^{P} is

[chemical structure]

wherein r is 1, 2, or 3; each R^{P2} is independently halogen, nitro, cyano, C₁₋₄alkoxy, C₁₋₄alkyl, C₁₋₄haloalkyl; and each R^{P3} is independently hydrogen, methyl, or ethyl.

[0637] In some embodiments, when present, R¹ is C₁₋₆alkyl and R^{P} is methoxyacetyl (mac), phenoxyacetyl (pac), 2-chlorophenoxyacetyl, 3-chlorophenoxyacetyl, 4-chlorophenoxyacetyl, 2,4-dichlorophenoxyacetyl, 2-methylphenoxyacetyl, 3-methylphenoxyacetyl, 4-methylphenoxyacetyl, 4-chloro-2-methylphenoxyacetyl, 2-nitrophenoxyacetyl, 3-nitrophenoxyacetyl, 4-nitrophenoxyacetyl, 2-isopropylphenoxyacetyl, 3-isopropylphenoxyacetyl, 4-isopropylphenoxyacetyl, 2-(t-butyl)phenoxyacetyl, 3-(t-butyl)phenoxyacetyl, 4-(t-butyl)phenoxyacetyl, 2-fluorophenoxyacetyl, 3-fluorophenoxyacetyl, 4-fluorophenoxyacetyl, 2,4-difluorophenoxyacetyl, 4-(trifluoromethoxy)phenoxyacetyl, 2-phenoxypropanoyl, 2-(4-chloro-2-methylphenoxy)propanoyl, or 2-(4-chlorophenoxy)propanoyl.

[0638] In some embodiments, when present, R¹ is C₁₋₆alkyl and R^{P} is methoxyacetyl (mac), phenoxyacetyl (pac), 2-chlorophenoxyacetyl, 4-chlorophenoxyacetyl, 2-methylphenoxyacetyl, 4-methylphenoxyacetyl, or 4-isopropylphenoxyacetyl.

[0639] In some embodiments, when present, R¹ is C₁₋₆alkyl and R^{P} is methoxyacetyl (mac).

[0640] In some embodiments, when present, R¹ is C₁₋₆alkyl and R^{P} is phenoxyacetyl (pac).

[0641] In some embodiments, when present, R¹ is methyl and R^{P} is

[chemical structure]

wherein r is 1, 2, or 3; each R^{P2} is independently halogen, nitro, cyano, C₁₋₄alkoxy, C₁₋₄alkyl, C₁₋₄haloalkyl; and each R^{P3} is independently hydrogen, methyl, or ethyl.

[0642] In some embodiments, when present, R¹ is methyl and R^{P} is methoxyacetyl (mac), phenoxyacetyl (pac), 2-chlorophenoxyacetyl, 3-chlorophenoxyacetyl, 4-chlorophenoxyacetyl, 2,4-dichlorophenoxyacetyl, 2-methylphenoxyacetyl, 3-methylphenoxyacetyl, 4-methylphenoxyacetyl, 4-chloro-2-methylphenoxyacetyl, 2-nitrophenoxyacetyl, 3-nitrophenoxyacetyl, 4-nitrophenoxyacetyl, 2-isopropylphenoxyacetyl, 3-isopropylphenoxyacetyl, 4-isopropylphenoxyacetyl, 2-(t-butyl)phenoxyacetyl, 3-(t-butyl)phenoxyacetyl, 4-(t-butyl)phenoxyacetyl, 2-fluorophenoxyacetyl, 3-fluorophenoxyacetyl, 4-fluorophenoxyacetyl, 2,4-difluorophenoxyacetyl, 4-(trifluoromethoxy)phenoxyacetyl, 2-phenoxypropanoyl, 2-(4-chloro-2-methylphenoxy)propanoyl, or 2-(4-chlorophenoxy)propanoyl.

[0643] In some embodiments, when present, R¹ is methyl and R^{P} is methoxyacetyl (mac), phenoxyacetyl (pac), 2-chlorophenoxyacetyl, 4-chlorophenoxyacetyl, 2-methylphenoxyacetyl, 4-methylphenoxyacetyl, or 4-isopropylphenoxyacetyl.

[0644] In some embodiments, when present, R¹ is methyl and R^{P} is methoxyacetyl (mac).

[0645] In some embodiments, when present, R¹ is methyl and R^{P} is phenoxyacetyl (pac).

[0646] In some embodiments, when present, R¹ is hydrogen and R^{P} is

[chemical structure]

wherein r is 1, 2, or 3; each R^{P2} is independently halogen, nitro, cyano, C₁₋₄alkoxy, C₁₋₄alkyl, C₁₋₄haloalkyl; and each R^{P3} is independently hydrogen, methyl, or ethyl.

[0647] In some embodiments, when present, R¹ is hydrogen and R^{P} is methoxyacetyl (mac), phenoxyacetyl (pac), 2-chlorophenoxyacetyl, 3-chlorophenoxyacetyl, 4-chlorophenoxyacetyl, 2,4-dichlorophenoxyacetyl, 2-methylphenoxyacetyl, 3-methylphenoxyacetyl, 4-methylphenoxyacetyl, 4-chloro-2-methylphenoxyacetyl, 2-nitrophenoxyacetyl, 3-nitrophenoxyacetyl, 4-nitrophenoxyacetyl, 2-isopropylphenoxyacetyl, 3-isopropylphenoxyacetyl, 4-isopropylphenoxyacetyl, 2-(t-butyl)phenoxyacetyl, 3-(t-butyl)phenoxyacetyl, 4-(t-butyl)phenoxyacetyl, 2-fluorophenoxyacetyl, 3-fluorophenoxyacetyl, 4-fluorophenoxyacetyl, 2,4-difluorophenoxyacetyl, 4-(trifluoromethoxy)phenoxyacetyl, 2-phenoxypropanoyl, 2-(4-chloro-2-methylphenoxy)propanoyl, or 2-(4-chlorophenoxy)propanoyl.

[0648] In some embodiments, when present, R¹ is hydrogen and R^{P} is methoxyacetyl (mac), phenoxyacetyl (pac), 2-chlorophenoxyacetyl, 4-chlorophenoxyacetyl, 2-methylphenoxyacetyl, 4-methylphenoxyacetyl, or 4-isopropylphenoxyacetyl.

[0649] In some embodiments, when present, R¹ is hydrogen and R^{P} is methoxyacetyl (mac).

[0650] In some embodiments, when present, R¹ is hydrogen and R^{P} is phenoxyacetyl (pac).

### Species Embodiments, Formula (IV)

[0651] In some embodiments, the compound of Formula (IV) is selected from the group consisting of,

| | |
|---|---|
| [chemical structure] | 5-(4-(3-(3,5-dimethyl-1H-pyrazol-1-yl)-5-((S)-4-methoxy- 4-oxo-1-((R)-3-(2-(5,6,7,8-tetrahydro-1,8-naphthyridin-2- yl)ethyl)pyrrolidin-1-yl)butan-2-yl)phenyl)piperazin-1- yl)-5-oxopentanoic acid; |
| [chemical structure] | 5-(4-(3-((S)-1-carboxy-3-((R)-3-(2-(5,6,7,8-tetrahydro- 1,8-naphthyridin-2-yl)ethyl)pyrrolidin-1-yl)propan-2-yl)- 5-(3,5-dimethyl-1H-pyrazol-1-yl)phenyl)piperazin-1-yl)- 5-oxopentanoic acid; |
| [chemical structure] | methyl (S)-3-(3-(4-(5-azidopentanoyl)piperazin-1-yl)-5- (3,5-dimethyl-1H-pyrazol-1-yl)phenyl)-4-((R)-3-(2- (5,6,7,8-tetrahydro-1,8-naphthyridin-2-yl)ethyl)pyrrolidin- 1-yl)butanoate; |
| [chemical structure] | (S)-3-(3-(4-(5-azidopentanoyl)piperazin-1-yl)-5-(3,5- dimethyl-1H-pyrazol-1-yl)phenyl)-4-((R)-3-(2-(5,6,7,8- tetrahydro-1,8-naphthyridin-2-yl)ethyl)pyrrolidin-1- yl)butanoic acid; |
| [chemical structure] | methyl (S)-3-(3-(4-(5-((6-azidohexyl)amino)-5- oxopentanoyl)piperazin-1-yl)-5-(3,5-dimethyl-1H- pyrazol-1-yl)phenyl)-4-((R)-3-(2-(5,6,7,8-tetrahydro-1,8- naphthyridin-2-yl)ethyl)pyrrolidin-1-yl)butanoate; |
| [chemical structure] | (S)-3-(3-(4-(5-((6-azidohexyl)amino)-5- oxopentanoyl)piperazin-1-yl)-5-(3,5-dimethyl-1H- pyrazol-1-yl)phenyl)-4-((R)-3-(2-(5,6,7,8-tetrahydro-1,8- naphthyridin-2-yl)ethyl)pyrrolidin-1-yl)butanoic acid; |
| [chemical structure] | methyl (S)-3-(3-(4-(2-(2-(2-(2- azidoethoxy)ethoxy)ethoxy)ethyl)piperazin-1-yl)-5-(3,5- dimethyl-1H-pyrazol-1-yl)phenyl)-4-((R)-3-(2-(5,6,7,8- tetrahydro-1,8-naphthyridin-2-yl)ethyl)pyrrolidin-1- yl)butanoate |
| [chemical structure] | (S)-3-(3-(4-(2-(2-(2-(2- azidoethoxy)ethoxy)ethoxy)ethyl)piperazin-1-yl)-5-(3,5- dimethyl-1H-pyrazol-1-yl)phenyl)-4-((R)-3-(2-(5,6,7,8- tetrahydro-1,8-naphthyridin-2-yl)ethyl)pyrrolidin-1- yl)butanoic acid |
| [chemical structure] | 5-(4-(3-(3,5-dimethyl-1H-pyrazol-1-yl)-5-((R)-4- methoxy-4-oxo-1-((R)-3-(2-(5,6,7,8-tetrahydro-1,8- naphthyridin-2-yl)ethyl)pyrrolidin-1-yl)butan-2- yl)phenyl)piperazin-1-yl)-5-oxopentanoic acid; |
| [chemical structure] | 5-(4-(3-((R)-1-carboxy-3-((R)-3-(2-(5,6,7,8-tetrahydro- 1,8-naphthyridin-2-yl)ethyl)pyrrolidin-1-yl)propan-2-yl)- 5-(3,5-dimethyl-1H-pyrazol-1-yl)phenyl)piperazin-1-yl)- 5-oxopentanoic acid; |
| [chemical structure] | methyl (R)-3-(3-(4-(5-azidopentanoyl)piperazin-1-yl)-5- (3,5-dimethyl-1H-pyrazol-1-yl)phenyl)-4-((R)-3-(2- (5,6,7,8-tetrahydro-1,8-naphthyridin-2-yl)ethyl)pyrrolidin- 1-yl)butanoate; |
| [chemical structure] | (R)-3-(3-(4-(5-azidopentanoyl)piperazin-1-yl)-5-(3,5- dimethyl-1H-pyrazol-1-yl)phenyl)-4-((R)-3-(2-(5,6,7,8- tetrahydro-1,8-naphthyridin-2-yl)ethyl)pyrrolidin-1- yl)butanoic acid; |
| [chemical structure] | methyl (R)-3-(3-(4-(5-((6-azidohexyl)amino)-5- oxopentanoyl)piperazin-1-yl)-5-(3,5-dimethyl-1H- pyrazol-1-yl)phenyl)-4-((R)-3-(2-(5,6,7,8-tetrahydro-1,8- naphthyridin-2-yl)ethyl)pyrrolidin-1-yl)butanoate; |
| [chemical structure] | (R)-3-(3-(4-(5-((6-azidohexyl)amino)-5- oxopentanoyl)piperazin-1-yl)-5-(3,5-dimethyl-1H- pyrazol-1-yl)phenyl)-4-((R)-3-(2-(5,6,7,8-tetrahydro-1,8- naphthyridin-2-yl)ethyl)pyrrolidin-1-yl)butanoic acid; |
| [chemical structure] | methyl (R)-3-(3-(4-(2-(2-(2-(2- azidoethoxy)ethoxy)ethoxy)ethyl)piperazin-1-yl)-5-(3,5- dimethyl-1H-pyrazol-1-yl)phenyl)-4-((R)-3-(2-(5,6,7,8- tetrahydro-1,8-naphthyridin-2-yl)ethyl)pyrrolidin-1- yl)butanoate |
| [chemical structure] | (R)-3-(3-(4-(2-(2-(2-(2- azidoethoxy)ethoxy)ethoxy)ethyl)piperazin-1-yl)-5-(3,5- dimethyl-1H-pyrazol-1-yl)phenyl)-4-((R)-3-(2-(5,6,7,8- tetrahydro-1,8-naphthyridin-2-yl)ethyl)pyrrolidin-1- yl)butanoic acid |
| [chemical structure] | 5-(4-(3-(3,5-dimethyl-1H-pyrazol-1-yl)-5-((S)-4-methoxy- 4-oxo-1-((R)-3-(((5,6,7,8-tetrahydro-1,8-naphthyridin-2- yl)oxy)methyl)pyrrolidin-1-yl)butan-2- yl)phenyl)piperazin-1-yl)-5-oxopentanoic acid; |
| [chemical structure] | 5-(4-(3-((S)-1-carboxy-3-((R)-3-(((5,6,7,8-tetrahydro-1,8- naphthyridin-2-yl)oxy)methyl)pyrrolidin-1-yl)propan-2- yl)-5-(3,5-dimethyl-1H-pyrazol-1-yl)phenyl)piperazin-1- yl)-5-oxopentanoic acid; |
| [chemical structure] | methyl (S)-3-(3-(4-(5-azidopentanoyl)piperazin-1-yl)-5- (3,5-dimethyl-1H-pyrazol-1-yl)phenyl)-4-((R)-3- (((5,6,7,8-tetrahydro-1,8-naphthyridin-2- yl)oxy)methyl)pyrrolidin-1-yl)butanoate; |
| [chemical structure] | (S)-3-(3-(4-(5-azidopentanoyl)piperazin-1-yl)-5-(3,5- dimethyl-1H-pyrazol-1-yl)phenyl)-4-((R)-3-(((5,6,7,8- tetrahydro-1,8-naphthyridin-2-yl)oxy)methyl)pyrrolidin-1- yl)butanoic acid; |
| [chemical structure] | methyl (S)-3-(3-(4-(5-((6-azidohexyl)amino)-5- oxopentanoyl)piperazin-1-yl)-5-(3,5-dimethyl-1H- pyrazol-1-yl)phenyl)-4-((R)-3-(((5,6,7,8-tetrahydro-1,8- naphthyridin-2-yl)oxy)methyl)pyrrolidin-1-yl)butanoate; |
| [chemical structure] | (S)-3-(3-(4-(5-((6-azidohexyl)amino)-5- oxopentanoyl)piperazin-1-yl)-5-(3,5-dimethyl-1H- pyrazol-1-yl)phenyl)-4-((R)-3-(((5,6,7,8-tetrahydro-1,8- naphthyridin-2-yl)oxy)methyl)pyrrolidin-1-yl)butanoic acid; |
| [chemical structure] | methyl (S)-3-(3-(4-(2-(2-(2-(2- azidoethoxy)ethoxy)ethoxy)ethyl)piperazin-1-yl)-5-(3,5- dimethyl-1H-pyrazol-1-yl)phenyl)-4-((R)-3-(((5,6,7,8- tetrahydro-1,8-naphthyridin-2-yl)oxy)methyl)pyrrolidin-1- yl)butanoate |
| [chemical structure] | (S)-3-(3-(4-(2-(2-(2-(2- azidoethoxy)ethoxy)ethoxy)ethyl)piperazin-1-yl)-5-(3,5- dimethyl-1H-pyrazol-1-yl)phenyl)-4-((R)-3-(((5,6,7,8- tetrahydro-1,8-naphthyridin-2-yl)oxy)methyl)pyrrolidin-1- yl)butanoic acid |
| [chemical structure] | 5-(4-(3-(3,5-dimethyl-1H-pyrazol-1-yl)-5-((S)-4-methoxy- 1-((R)-3-(2-(4-methoxy-5,6,7,8-tetrahydro-1,8- naphthyridin-2-yl)ethyl)pyrrolidin-1-yl)-4-oxobutan-2- yl)phenyl)piperazin-1-yl)-5-oxopentanoic acid; |
| [chemical structure] | 5-(4-(3-((S)-1-carboxy-3-((R)-3-(2-(4-methoxy-5,6,7,8- tetrahydro-1,8-naphthyridin-2-yl)ethyl)pyrrolidin-1- yl)propan-2-yl)-5-(3,5-dimethyl-1H-pyrazol-1- yl)phenyl)piperazin-1-yl)-5-oxopentanoic acid; |
| [chemical structure] | methyl (S)-3-(3-(4-(5-azidopentanoyl)piperazin-1-yl)-5- (3,5-dimethyl-1H-pyrazol-1-yl)phenyl)-4-((R)-3-(2-(4- methoxy-5,6,7,8-tetrahydro-1,8-naphthyridin-2- yl)ethyl)pyrrolidin-1-yl)butanoate; |
| [chemical structure] | (S)-3-(3-(4-(5-azidopentanoyl)piperazin-1-yl)-5-(3,5- dimethyl-1H-pyrazol-1-yl)phenyl)-4-((R)-3-(2-(4- methoxy-5,6,7,8-tetrahydro-1,8-naphthyridin-2- yl)ethyl)pyrrolidin-1-yl)butanoic acid; |
| [chemical structure] | methyl (S)-3-(3-(4-(5-((6-azidohexyl)amino)-5- oxopentanoyl)piperazin-1-yl)-5-(3,5-dimethyl-1H- pyrazol-1-yl)phenyl)-4-((R)-3-(2-(4-methoxy-5,6,7,8- tetrahydro-1,8-naphthyridin-2-yl)ethyl)pyrrolidin-1- yl)butanoate; |
| [chemical structure] | (S)-3-(3-(4-(5-((6-azidohexyl)amino)-5- oxopentanoyl)piperazin-1-yl)-5-(3,5-dimethyl-1H- pyrazol-1-yl)phenyl)-4-((R)-3-(2-(4-methoxy-5,6,7,8- tetrahydro-1,8-naphthyridin-2-yl)ethyl)pyrrolidin-1- yl)butanoic acid; |
| [chemical structure] | methyl (S)-3-(3-(4-(2-(2-(2-(2- azidoethoxy)ethoxy)ethoxy)ethyl)piperazin-1-yl)-5-(3,5- dimethyl-1H-pyrazol-1-yl)phenyl)-4-((R)-3-(2-(4- methoxy-5,6,7,8-tetrahydro-1,8-naphthyridin-2- yl)ethyl)pyrrolidin-1-yl)butanoate |
| [chemical structure] | (S)-3-(3-(4-(2-(2-(2-(2- azidoethoxy)ethoxy)ethoxy)ethyl)piperazin-1-yl)-5-(3,5- dimethyl-1H-pyrazol-1-yl)phenyl)-4-((R)-3-(2-(4- methoxy-5,6,7,8-tetrahydro-1,8-naphthyridin-2- yl)ethyl)pyrrolidin-1-yl)butanoic acid |
| [chemical structure] | tert-butyl 7-(((R)-1-((S)-2-(3-(4-(5- azidopentanoyl)piperazin-1-yl)-5-(3,5-dimethyl-1H- pyrazol-1-yl)phenyl)-4-methoxy-4-oxobutyl)pyrrolidin-3- yl)methoxy)-3,4-dihydro-1,8-naphthyridine-1(2H)- carboxylate |
| [chemical structure] | tert-butyl 7-(((R)-1-((S)-2-(3-(4-(5-((6- azidohexyl)amino)-5-oxopentanoyl)piperazin-1-yl)-5- (3,5-dimethyl-1H-pyrazol-1-yl)phenyl)-4-methoxy-4- oxobutyl)pyrrolidin-3-yl)methoxy)-3,4-dihydro-1,8- naphthyridine-1(2H)-carboxylate |
| [chemical structure] | tert-butyl 7-(((R)-1-((S)-2-(3-(4-(2-(2-(2-(2- azidoethoxy)ethoxy)ethoxy)ethyl)piperazin-1-yl)-5-(3,5- dimethyl-1H-pyrazol-1-yl)phenyl)-4-methoxy-4- oxobutyl)pyrrolidin-3-yl)methoxy)-3,4-dihydro-1,8- naphthyridine-1(2H)-carboxylate |
| [chemical structure] | methyl (S)-4-((R)-3-(2-(6-amino-5- - 2-yl)ethyl)pyrrolidin- 1-yl)-3-(3-(4-(5-azidopentanoyl)piperazin-1-yl)-5-(3,5- dimethyl-1H-pyrazol-1-yl)phenyl)butanoate |
| [chemical structure] | 5-(4-(3-((S)-1-((R)-3-(2-(6-amino-5-methoxypyridin-2- yl)ethyl)pyrrolidin-1-yl)-4-methoxy-4-oxobutan-2-yl)-5- (3,5-dimethyl-1H-pyrazol-1-yl)phenyl)piperazin-1-yl)-5- oxopentanoic acid |
| [chemical structure] | 5-(4-(3-((S)-1-((R)-3-(2-(6-amino-5-methoxypyridin-2- yl)ethyl)pyrrolidin-1-yl)-3-carboxypropan-2-yl)-5-(3,5- dimethyl-1H-pyrazol-1-yl)phenyl)piperazin-1-yl)-5- oxopentanoic acid |
| [chemical structure] | methyl (S)-4-((R)-3-(2-(6-amino-5-methoxypyridin-2- yl)ethyl)pyrrolidin-1-yl)-3-(3-(4-(5- azidopentanoyl)piperazin-1-yl)-5-(3,5-dimethyl-1H- pyrazol-1-yl)phenyl)butanoate |
| [chemical structure] | (S)-4-((R)-3-(2-(6-amino-5-methoxypyridin-2- yl)ethyl)pyrrolidin-1-yl)-3-(3-(4-(5- azidopentanoyl)piperazin-1-yl)-5-(3,5-dimethyl-1H- pyrazol-1-yl)phenyl)butanoic acid |
| [chemical structure] | methyl (S)-4-((R)-3-(2-(6-amino-5-methoxypyridin-2- yl)ethyl)pyrrolidin-1-yl)-3-(3-(4-(5-((6- azidohexyl)amino)-5-oxopentanoyl)piperazin-1-yl)-5- (3,5-dimethyl-1H-pyrazol-1-yl)phenyl)butanoate |
| [chemical structure] | (S)-4-((R)-3-(2-(6-amino-5-methoxypyridin-2- yl)ethyl)pyrrolidin-1-yl)-3-(3-(4-(5-((6- azidohexyl)amino)-5-oxopentanoyl)piperazin-1-yl)-5- (3,5-dimethyl-1H-pyrazol-1-yl)phenyl)butanoic acid |
| [chemical structure] | methyl (S)-4-((R)-3-(2-(6-amino-5-methoxypyridin-2- yl)ethyl)pyrrolidin-1-yl)-3-(3-(4-(2-(2-(2-(2- azidoethoxy)ethoxy)ethoxy)ethyl)piperazin-1-yl)-5-(3,5- dimethyl-1H-pyrazol-1-yl)phenyl)butanoate |
| [chemical structure] | (S)-4-((R)-3-(2-(6-amino-5-methoxypyridin-2- yl)ethyl)pyrrolidin-1-yl)-3-(3-(4-(2-(2-(2-(2- azidoethoxy)ethoxy)ethoxy)ethyl)piperazin-1-yl)-5-(3,5- dimethyl-1H-pyrazol-1-yl)phenyl)butanoic acid |
| | and salts thereof. |

[0652] In another embodiment, the compound of Formula (IV) is selected from the group consisting of,

| | |
|---|---|
| [chemical structure] | perfluorophenyl 5-(4-(3-(3,5-dimethyl-1H-pyrazol- 1-yl)-5-((S)-4-methoxy-4-oxo-1-((R)-3-(2-(8-(2- phenoxyacetyl)-5,6,7,8-tetrahydro-1,8- naphthyridin-2-yl)ethyl)pyrrolidin-1-yl)butan-2- yl)phenyl)piperazin-1-yl)-5-oxopentanoate |
| [chemical structure] | 5-(4-(3-(3,5-dimethyl-1H-pyrazol-1-yl)-5-((S)-4- methoxy-4-oxo-1-((R)-3-(2-(8-(2-phenoxyacetyl)- 5,6,7,8-tetrahydro-1,8-naphthyridin-2- yl)ethyl)pyrrolidin-1-yl)butan-2- yl)phenyl)piperazin-1-yl)-5-oxopentanoic acid |
| and salts thereof. | |

B. Alpha-v-Beta-6 (αvβ6) Integrin Ligands

[0653] In another aspect, the present application provides modified integrin-modifying compounds in a conjugated to a carrier group suitable for conjugation to or incorporation into an oligonucleotide. In some embodiments, the present disclosure provides a compound of the Formula (X),

[chemical structure]

or a salt thereof, wherein:
[0654] R¹, R^{Y} and Y are as defined for Formula (IV); and
[0655] R^{L} is —N(R³)(R⁴), —O(R⁵), —S(R⁵), or —R⁵, wherein
   [0656] R³ and R⁴ are either
      [0657] (i) R³ is hydrogen or C₁₋₆alkyl and R⁴ is R⁵; or
      [0658] (ii) R³ and R⁴ taken together with the nitrogen atom to which they are attached form a 4-8 membered monocyclic heterocyclyl group that is substituted with R⁵;
   [0659] and
   [0660] R⁵ is -L-ZZ-L′-R^{T} wherein
      [0661] L and L′ are independently -L¹-[G-L²]_{q}-G-L³-*, wherein
         [0662] * is the bond to ZZ;
         [0663] q is 0 or an integer selected from 1-25; (e.g., 1-20, or 1-15);
         [0664] L¹ is a bond or -B-A-;
         [0665] each L² is independently -A-B-A-;
         [0666] L³ is a bond or -A-B-A-;
         [0667] each G is independently -D-E-F-, wherein D, E, and F are independently a bond, C₁₋₁₀alkyl, C₂₋₁₀alkenyl, C₂₋₁₀alkynyl, C₃₋₁₀cycloalkyl, 3-10 membered heterocyclyl, aryl, or heteroaryl, each of which is optionally substituted with 1, 2, 3, or 4 R groups;
         [0668] each A is independently a bond, —O—, —S—, or —N(R^{N})—.
         [0669] each B is independently a bond, CH₂, C(O), C(S), C(NR^{N}), (O), S(O)₂, P(O)(OH), P(S)(OH), or P(S)(SH);
         [0670] each R^{N} is independently hydrogen or C₁₋₆alkyl, or two R^{N} within an -A-B-A- group taken together with the atoms to which they are connected from a 4-8 membered heterocyclyl; and
   [0671] ZZ is -A′-B′-A′- or a linking group formed by a reactive pair, wherein
      [0672] each A′ is independently a bond, —O—, —S—, or —N(R^{N3})—;
      [0673] each B′ is independently a bond, CH₂, C(O), C(S), C(NR^{N3}), —C═N—, S(O), S(O)₂, P(O)(OH), P(S)(OH), or P(S)(SH); and
      [0674] each R^{N3} is independently hydrogen or C₁₋₆alkyl, or two R^{N3} within the -A′-B′-A′- group taken together with the atoms to which they are connected from a 4-8 membered heterocyclyl;
   [0675] R^{T} is R^{T1} or -G⁰-OR^{T1}, wherein
      [0676] G⁰ is absent or -D⁰-E⁰-F⁰-, wherein D⁰, E⁰, and F⁰ are independently a bond, C₁₋₁₀alkyl, C₂₋₁₀alkenyl, C₂₋₁₀alkynyl, C₃₋₁₀cycloalkyl, 3-10 membered heterocyclyl, aryl, or heteroaryl, each of which is optionally substituted with 1, 2, 3, or 4 R groups;
      [0677] and
      [0678] R^{T1} is hydrogen, a hydroxyl protecting group, a phosphorous coupling group, or -L^{K}-S^{S}, or -L^{L}-oligonucleotide, wherein
         [0679] L^{K} is a support linking group;
         [0680] L^{L} is an oligonucleotide linking group; and
         [0681] S^{S} is a solid support, —OR^{SS} or —N(R^{SS})₂, or hydrogen, wherein each R^{SS} is independently hydrogen or C₁₋₆alkyl.
[0682] and
[0683] each R group is independently selected from the group consisting of R′, C₁₋₆alkyl, C₁₋₆ haloalkyl, C₂₋₆alkenyl, C₂₋₆alkynyl, C₃₋₈cycloalkyl, heterocyclyl, aryl, heteroaryl, C₃₋₈cycloalkylC₁₋₆alkyl, heterocyclylC₁₋₆alkyl, aryl C₁₋₆alkyl, heteroarylC₁₋₆alkyl, each of which, other than R′, is optionally substituted with 1, 2, or 3 R′ groups, wherein
   [0684] each R′ is independently halogen, cyano, azido, nitro, —N(R^{b})₂, —O(R^{a}), —S(R⁰), —C(O)OR⁰,
   [0685] C(O)R⁰, —C(O)N(R⁰)₂, —C(NR⁰)OR, —C(NR⁰)R⁰, —C(NR⁰)N(R⁰)₂, —C(S)OR⁰, —C(S)R⁰, —C(S)N(R⁰)₂, —S(O)₂R⁰, —S(O)₂OR⁰, —S(O)₂N(R⁰)₂, —N(R⁰)C(O)OR⁰, —N(R⁰)C(O)R⁰, —N (R⁰)C(O)N(R⁰)₂, —N(R⁰)S(O)₂R⁰, —N(R⁰)S(O)₂OR⁰, —N(R⁰)S(O)₂N(R⁰)₂, —OC(O)OR⁰, —OC(O)R⁰, —OC(O)N(R⁰)₂, —OS(O)₂R⁰, —OS(O)₂OR⁰, —OS(O)₂N(R⁰)₂, or —SC(O)R⁰, wherein
      [0686] each R⁰ is independently hydrogen or C₁₋₆alkyl; each R^{a} is independently hydrogen, C₁₋₆alkyl, or a hydroxyl protecting group; and each R^{b} is independently hydrogen, C₁₋₆alkyl, or a nitrogen protecting group
[0687] provided that in each -D-E-F- group, at least one of D, E, and F is not a bond; and R^{L} is not N-morpholinyl.

[0688] Embodiment for the variables of Formula (X) that are the same as Formula (IV) are as described above for Formula (IV).

[0689] In some embodiments of Formula (X), in —N(R³)(R⁴), R³ and R⁴ do not form a morpholino ring.

[0690] In some embodiments of Formula (X), in each -A-B-A- group, B is only a bond when one of the A groups is not a bond.

### R^{T} Embodiments, Formula (X)

[0691] In some embodiments of Formula (X), R^{T} is R^{T1} (e.g., -L^{L}-oligonucleotide).

[0692] In some embodiments of Formula (X), R^{T} is -G⁰-OR^{T1}, wherein R^{T1} is as defined for Formula (X) and G⁰ is selected from:
[0693] (a) G⁰ is absent or -D⁰-E⁰-F⁰-, wherein D⁰, E⁰, and F⁰ are independently a bond, C₁₋₁₀alkyl, C₂₋₁₀alkenyl, C₂₋₁₀alkynyl, C₃₋₁₀cycloalkyl, 3-10 membered heterocyclyl, aryl, or heteroaryl, each of which is optionally substituted with 1, 2, 3, or 4 R groups;
[0694] (b) G⁰ is -D⁰-E⁰-F⁰-, wherein
   [0695] D⁰ and F⁰ are independently a bond or C₁₋₁₀alkyl optionally substituted with 1, 2, 3, or 4 R groups; and
   [0696] E⁰ is C₃₋₁₀cycloalkyl, 3-10 membered heterocyclyl, aryl, or heteroaryl, each of which is optionally substituted with 1, 2, 3, or 4 R groups;
[0697] (c) G⁰ is -D⁰-E⁰-F⁰-, wherein
   [0698] D⁰ and F⁰ are independently a bond or C₁₋₁₀alkyl optionally substituted with 1, 2, 3, or 4 R groups; and
   [0699] E⁰ is 3-10 membered heterocyclyl optionally substituted with 1, 2, 3, or 4 R groups; and
[0700] (d) G⁰ is 3-10 membered heterocyclyl optionally substituted with 1 or 2 R groups; examples include

[chemical structure]

G⁰ is tetrahydrofuranyl, pyrrolidinyl, piperidinyl, piperazinyl, or morpholinyl, each optionally substituted with 1 or 2 R groups; examples include:

[chemical structure]

and
[0701] (e) G⁰ is 3-10 membered-heterocyclyl-C₁₋₁₀alkyl, optionally substituted with 1, 2, 3, or 4 R groups; examples include,

[chemical structure]

[0702] (f) G⁰ is C₁₋₁₀alkyl, C₂₋₁₀alkenyl, C₂₋₁₀alkynyl, each of which is optionally substituted with 1, 2, 3, or 4 R groups (e.g., 1 or 2 R groups);
[0703] (g) G⁰ is C₁₋₁₀alkyl or C₂₋₁₀alkenyl, each of which is optionally substituted with 1 or 2 R groups;
[0704] (h) G⁰ is C₁₋₁₀alkyl optionally substituted with 1 or 2 R groups;
[0705] (i) G⁰ is C₁₋₁₀alkyl, optionally substituted with —O(R^{a}), wherein R^{a} is independently hydrogen, C₁₋₆alkyl, or a hydroxyl protecting group; e.g.,

[chemical structure]

[0706] (j) G⁰ is C₁₋₁₀alkyl,
[0707] and
[0708] (k) G⁰ is absent (a bond);
   wherein * represents the bond to L′, the broken bond represents the bond to OR^{T1}, and R is —C₁₋₆alkyl-OR^{a} or —OR^{a}, wherein R^{a} is independently hydrogen, C₁₋₆alkyl, or a hydroxyl protecting group;

### -L′- Embodiments, Formula (X)

[0709] In some embodiments of Formula (X), -L′- is *-G-L′-, wherein * is the bond to ZZ; and
[0710] (a) L¹ is a bond or -B-A-, wherein
   [0711] A is a bond, —O—, —S—, or —N(R^{N})—;
   [0712] B is a bond, CH₂, C(O), C(S), C(NR^{N}), S(O), S(O)₂, P(O)(OH), P(S)(OH), or P(S)(SH);
   [0713] each R^{N} is independently hydrogen or C₁₋₆alkyl; and
   [0714] G is -D-E-F-, wherein D, E, and F are independently a bond, C₁₋₁₀alkyl, C₂₋₁₀alkenyl, C₂₋₁₀alkynyl, C₃₋₁₀cycloalkyl, 3-10 membered heterocyclyl, aryl, or heteroaryl, each of which is optionally substituted with 1, 2, 3, or 4 R groups;
[0715] (b) L¹ is a bond or -B-A-, wherein
   [0716] A is a bond, —O—, —S—, or —N(R^{N})—;
   [0717] B is a bond, CH₂, C(O), C(S), C(NR^{N}), S(O), S(O)₂, P(O)(OH), P(S)(OH), or P(S)(SH);
   [0718] each R^{N} is independently hydrogen or C₁₋₆alkyl; and
   [0719] G is C₁₋₁₀alkyl, C₂₋₁₀alkenyl, C₂₋₁₀alkynyl, C₃₋₁₀cycloalkyl, 3-10 membered heterocyclyl, aryl, or heteroaryl, each of which is optionally substituted with 1, 2, 3, or 4 R groups;
[0720] (c) L¹ is a bond, C(O), C(S), S(O)₂, P(O)(OH), or P(S)(OH); and
   [0721] G is C₁₋₁₀ alkyl, C₂₋₁₀alkenyl, C₂₋₁₀alkynyl, each of which is optionally substituted with 1, 2, 3, or 4 R groups;
[0722] (d) L¹ is a bond, C(O), C(S), S(O)₂, P(O)(OH), or P(S)(OH); and
   [0723] G is C₁₋₁₀ alkyl, C₂₋₁₀alkenyl, C₂₋₁₀alkynyl, each of which is optionally substituted with 1, 2, 3, or 4 R groups;
[0724] or
[0725] (e) L¹ is a bond, C(O), C(S), S(O)₂, P(O)(OH), or P(S)(OH); and G is C₁₋₁₀alkyl.

[0726] In some embodiments of Formula (X), -L′- is *-G-[L²-G]_{q}-L¹-, wherein * is the bond to ZZ; q, is 1, 2, 3, 4, 5, 6, 7, 8, 9, or 10 (e.g., an integer from 1 to 8, an integer from 1 to 5, or an integer from 1 to 3); and
[0727] (a) L¹ is a bond or -B-A-;
   [0728] each L² is independently -A-B-A-;
   [0729] each A is independently a bond, —O—, —S—, or —N(R^{N})—;
   [0730] each B is independently a bond, CH₂, C(O), C(S), C(NR^{N}), S(O), S(O)₂, P(O)(OH), P(S)(OH), or P(S)(SH);
   [0731] each R^{N} is independently hydrogen or C₁₋₆alkyl;
   [0732] each G is independently -D-E-F-, wherein D, E, and F are independently a bond, C₁₋₁₀alkyl, C₂₋₁₀alkenyl, C₂₋₁₀alkynyl, C₃₋₁₀cycloalkyl, 3-10 membered heterocyclyl, aryl, or heteroaryl, each of which is optionally substituted with 1, 2, 3, or 4 R groups;
[0733] (b) L¹ is a bond, CH₂, C(O), C(S), C(NR^{N}), S(O), S(O)₂, P(O)(OH), P(S)(OH), or P(S)(SH);
   [0734] each L² is independently -A-B-A-;
      [0735] each A is independently a bond, —O—, —S—, or —N(R^{N})—;
      [0736] each B is independently a bond, CH₂, C(O), C(S), C(NR^{N}), S(O), S(O)₂, P(O)(OH), P(S)(OH), or P(S)(SH);
      [0737] each R^{N} is independently hydrogen or C₁₋₆alkyl, and
      [0738] each G is independently a bond, C₁₋₁₀alkyl, optionally substituted with 1, 2, 3, or 4 R groups.
[0739] (c) L¹ is a bond, CH₂, C(O), C(S), C(NR^{N}), S(O), S(O)₂, P(O)(OH), P(S)(OH), or P(S)(SH);
   [0740] each L² is independently -A-B-A-;
   [0741] each A is independently a bond, —O—, —S—, or —N(R^{N})—, wherein R^{N} is hydrogen or C₁₋₆ alkyl
   [0742] each B is independently a bond, CH₂, C(O), C(S), S(O)₂, P(O)(OH), or P(S)(OH);
   [0743] each G is independently C₁₋₁₀alkyl, optionally substituted with 1, 2, 3, or 4 R groups
[0744] (d) L¹ is a bond, CH₂, C(O), C(S), S(O)₂, P(O)(OH), or P(S)(OH)
   [0745] each L² is independently -A-B-A-;
   [0746] each A is independently a bond, —O—, —S—, or —N(R^{N})—, wherein R^{N} is hydrogen or C₁₋₆ alkyl
   [0747] each B is independently a bond, CH₂, C(O), C(S), S(O)₂, P(O)(OH), or P(S)(OH);
   [0748] each G is independently C₁₋₁₀alkyl, optionally substituted with 1, 2, 3, or 4 R groups;
[0749] or
[0750] (e) L¹ is a bond, CH₂, C(O), S(O)₂, P(O)(OH), or P(S)(OH);
   [0751] each L² is independently -A-B-A-;
      [0752] each A is independently a bond, —O—, —S—, or —N(R^{N})—, wherein R^{N} is hydrogen or C₁₋₆ alkyl
      [0753] each B is independently a bond, CH₂, C(O), C(S), S(O)₂, P(O)(OH), or P(S)(OH);
      [0754] each G is independently C₁₋₁₀alkyl;

[0755] In some embodiments of Formula (X), -L′- is -[G-L²]_{q}-G-L³-*, wherein * is the bond to ZZ; and
[0756] (a) q is 0, 1, 2, 3, 4, or 5;
   [0757] each L² is independently -A-B-A-;
   [0758] L³ is a bond or -A-B-A-;
   [0759] each A is independently a bond, —O—, —S—, or —N(R^{N})—;
   [0760] each B is independently a bond, CH₂, C(O), C(S), C(NR^{N}), S(O), S(O)₂, P(O)(OH), P(S)(OH), or P(S)(SH);
   [0761] each R^{N} is independently hydrogen or C₁₋₆alkyl;
   [0762] each G is independently C₁₋₁₀alkyl, C₂₋₁₀alkenyl, C₂₋₁₀alkynyl, each of which is optionally substituted with 1, 2, 3, or 4 R groups;
[0763] (b) q is 0, 1, 2, or 3;
   [0764] each L² is independently a bond, C(O)O, OC(O), C(O)(NR^{N}), N(R^{N})C(O), SO₂N(R^{N}), N(R^{N})SO₂, OP(O)(OH), OP(S)(OH), P(O)(OH)O, P(S)(OH)O, OP(O)(OH)O, or OP(S)(OH)O, wherein each R^{N} is independently hydrogen or C₁₋₆ alkyl;
   [0765] each G is independently C₁₋₁₀alkyl, C₂₋₁₀alkenyl, C₂₋₁₀alkynyl, each of which is optionally substituted with 1 or 2 R groups;
[0766] (c) q is 0, 1, 2, or 3;
   [0767] each L² is independently a bond, C(O)O, OC(O), C(O)(NR^{N}), N(R^{N})C(O), OP(O)(OH)O, or OP(S)(OH)O, wherein each R^{N} is independently hydrogen or C₁₋₆ alkyl;
   [0768] each G is independently C₁₋₁₀alkyl or C₂₋₁₀alkenyl, each of which is optionally substituted with 1 or 2 R groups;
[0769] (d) q is 0, 1, 2, or 3 (e.g., q is 0, 1, or 2; or 0 or 1; or 0; or 1; or 2);
   [0770] each L² is independently C(O)O or OC(O);
   [0771] each G is independently C₁₋₁₀alkyl, each of which is optionally substituted with 1 or 2 R groups;
[0772] (e) q is 0, 1, 2, or 3 (e.g., q is 0, 1, or 2; or 0 or 1; or 0; or 1; or 2);
   [0773] each L² is independently C(O)(NR^{N}) or N(R^{N})C(O), wherein each R^{N} is independently hydrogen or C₁₋₆alkyl;
   [0774] each G is independently C₁₋₁₀alkyl, each of which is optionally substituted with 1 or 2 R groups;
[0775] (f) q is 0, 1, 2, or 3 (e.g., q is 0, 1, or 2; or 0 or 1; or 0; or 1; or 2);
   [0776] each L² is independently OP(O)(OH)O, or OP(S)(OH)O (e.g., each is OP(O)(OH)O);
   [0777] each G is independently C₁₋₁₀alkyl, each of which is optionally substituted with 1 or 2 R groups;
[0778] or
[0779] (g) q is 0, 1, 2, or 3 (e.g., q is 0, 1, or 2; or 0 or 1; or 0; or 1; or 2);
   [0780] each L² is a bond;
      [0781] each G is independently C₁₋₁₀alkyl, each of which is optionally substituted with 1 or 2 R groups.

[0782] In some embodiments, -L′- is *-L³-G-L¹-, wherein * is the bond to ZZ; and
[0783] (a) L¹ and L³ are independently -A-B-A-;
   [0784] each G is independently C₁₋₁₀alkyl, C₂₋₁₀alkenyl, C₂₋₁₀alkynyl, C₃₋₁₀cycloalkyl, 3-10 membered heterocyclyl, aryl, or heteroaryl, each of which is optionally substituted with 1, 2, or 3 R groups;
      [0785] each A is independently a bond, —O—, —S—, or —N(R^{N})—, wherein R^{N} is hydrogen or C₁₋₆ alkyl; and
      [0786] each B is independently a bond, C(O), C(S), S(O)₂, P(O)(OH), or P(S)(OH);
[0787] (b) L³ is —C(O)O— or C(O)N(R^{N})—, wherein R^{N} is hydrogen or C₁₋₆alkyl;
   [0788] L¹ is —OP(O)(OH)O— or —OP(S)(OH)O—; and
   [0789] each G is independently C₁₋₁₀alkyl, C₂₋₁₀alkenyl, C₂₋₁₀alkynyl, C₃₋₁₀cycloalkyl, 3-10 membered heterocyclyl, aryl, or heteroaryl, each of which is optionally substituted with 1, 2, or 3 R groups;
[0790] (c) L³ is —C(O)O— or C(O)N(R^{N})—, wherein R^{N} is hydrogen or C₁₋₆alkyl;
   [0791] L¹ is —OP(O)(OH)O— or —OP(S)(OH)O—; and
   [0792] each G is independently C₃₋₁₀cycloalkyl, 3-10 membered heterocyclyl, aryl, or heteroaryl, each of which is optionally substituted with one R group;
[0793] (d) L³ is —C(O)O— or C(O)N(R^{N})—, wherein R^{N} is hydrogen or C₁₋₆alkyl;
   [0794] L¹ is —OP(O)(OH)O— or —OP(S)(OH)O—; and
   [0795] each G is independently C₃₋₁₀cycloalkyl or 3-10 membered heterocyclyl;
[0796] (e) L³ is —C(O)O— or C(O)N(R^{N})—, wherein R^{N} is hydrogen or C₁₋₆alkyl;
   [0797] L¹ is —OP(O)(OH)O— or —OP(S)(OH)O—; and
   [0798] each G¹ is independently C₃₋₁₀cycloalkyl or 3-10 membered heterocyclyl; and

[0799] In some embodiments, -L′- is

[chemical structure]

wherein X is O or S (e.g., S).

[0800] In some embodiments, -L′- is *-G-, wherein * is the bond to ZZ; and G is C₁₋₁₀alkyl is optionally substituted with 1 or 2 R groups.

[0801] In embodiments of Formula (X), including embodiments of Formulae (x-a) through (x-x), -L′- is -L¹-[G-L²]_{q}-G-L³-*, wherein * is the bond to ZZ;

[0802] In some embodiments, -L′- is -L′-G-L³-*, wherein * is the bond to ZZ;

[0803] In some embodiments, -L′- is -L¹-[G-L²]_{q}-G-L³-*, wherein * is the bond to ZZ;
[0804] q is 0, 1, 2, 3, 4, or 5;
[0805] L¹ is a bond or -B-A-;
[0806] each L² is independently -A-B-A-;
[0807] L³ is a bond or -A-B-A-;
[0808] each A is independently a bond, —O—, —S—, or —N(R^{N})—;
[0809] each B is independently a bond, CH₂, C(O), C(S), C(NR^{N}), S(O), S(O)₂, P(O)(OH), P(S)(OH), or P(S)(SH);
[0810] each R^{N} is independently hydrogen or C₁₋₆alkyl; and
[0811] each G is independently C₁₋₁₀alkyl, C₂₋₁₀alkenyl, C₂₋₁₀alkynyl, each of which is optionally substituted with 1, 2, 3, or 4 R groups.

[0812] In some embodiments, -L′- is -L¹-[G-L²]_{q}-G-*, wherein * is the bond to ZZ;
[0813] q is 0, 1, 2, or 3;
[0814] L¹ is a bond or -B-A-;
[0815] each L² is independently a bond, C(O)O, OC(O), C(O)(NR^{N}), N(R^{N})C(O), SO₂N(R^{N}), N(R^{N})SO₂, OP(O)(OH), OP(S)(OH), P(O)(OH)O, P(S)(OH)O, OP(O)(OH)O, or OP(S)(OH)O, wherein each R^{N} is independently hydrogen or C₁₋₆alkyl; and
[0816] each G is independently C₁₋₁₀alkyl, C₂₋₁₀alkenyl, C₂₋₁₀alkynyl, each of which is optionally substituted with 1 or 2 R groups.

[0817] In some embodiments, -L′- is -L¹-[G-L²]_{q}-G-*, wherein * is the bond to ZZ;
[0818] q is 0, 1, 2, or 3;
[0819] L¹ is a bond or -B-A-;
[0820] each L² is independently a bond, C(O)O, OC(O), C(O)(NR^{N}), N(R^{N})C(O), OP(O)(OH)O, or OP(S)(OH)O, wherein each R^{N} is independently hydrogen or C₁₋₆ alkyl;
[0821] each G is independently C₁₋₁₀alkyl or C₂₋₁₀alkenyl, each of which is optionally substituted with 1 or 2 R groups.

[0822] In some embodiments, -L′- is -[G-L²]_{q}-G-*, wherein * is the bond to ZZ; and
[0823] (a) q is 0, 1, 2, or 3 (e.g., q is 0, 1, or 2; or 0 or 1; or 0; or 1; or 2);
   [0824] each L² is independently C(O)O or OC(O);
   [0825] each G is independently C₁₋₁₀alkyl, each of which is optionally substituted with 1 or 2 R groups;
[0826] (b) q is 0, 1, 2, or 3 (e.g., q is 0, 1, or 2; or 0 or 1; or 0; or 1; or 2);
   [0827] each L² is independently C(O)(NR^{N}) or N(R^{N})C(O), wherein each R^{N} is independently hydrogen or C₁₋₆alkyl; and
   [0828] each G is independently C₁₋₁₀alkyl, each of which is optionally substituted with 1 or 2 R groups;
[0829] (c) q is 0, 1, 2, or 3 (e.g., q is 0, 1, or 2; or 0 or 1; or 0; or 1; or 2);
   [0830] each L² is independently OP(O)(OH)O, or OP(S)(OH)O (e.g., each is OP(O)(OH)O); and each G is independently C₁₋₁₀alkyl, each of which is optionally substituted with 1 or 2 R groups;
[0831] or
[0832] (d) q is 0, 1, 2, or 3 (e.g., q is 0, 1, or 2; or 0 or 1; or 0; or 1; or 2);
   [0833] each L² is a bond; and each G is independently C₁₋₁₀alkyl, each of which is optionally substituted with 1 or 2 R groups.

[0834] In some embodiments, -L′- is —C₂₋₃₀alkyl-*, wherein * is the bond to ZZ, such as —C₅₋₂₀alkyl-* or —C₁₀₋₂₀alkyl-*.

[0835] In some embodiments, -L′- is —C(O)—C₂₋₃₀alkyl-*, wherein * is the bond to ZZ, such as —C(O)—C₅₋₂₀alkyl-* or —C(O)—C₁₀₋₂₀alkyl-*.

### L′-R^{T} Embodiments

[0836] In some embodiments, -L′-R^{T} is

[chemical structure]

wherein
[0837] * is the bond to ZZ;
[0838] L¹ is a bond, C(O), C(S), S(O)₂, P(O)(OH), or P(S)(OH); and
   R^{T1} is as defined for Formula (X).

[0839] In some embodiments, -L′-R^{T} is

[chemical structure]

wherein
[0840] * is the bond to ZZ;
[0841] L¹ is a bond, C(O), C(S), S(O)₂, P(O)(OH), or P(S)(OH); and R^{T1} is as defined for Formula (X).

[0842] In some embodiments, -L′-R^{T} is

[chemical structure]

[0843] wherein * is the bond to ZZ;
[0844] L¹ is a bond, C(O), C(S), S(O)₂, P(O)(OH), or P(S)(OH);
[0845] R is —O(R^{a}) or —C₁₋₆alkyl-O(R^{a}), wherein R^{a} is hydrogen or a hydroxyl protecting group; and
[0846] R^{T1} is as defined for Formula (X).

[0847] In some embodiments, -L′-R^{T} is

[chemical structure]

[0848] wherein * is the bond to ZZ;
[0849] L¹ is a bond, C(O), C(S), S(O)₂, P(O)(OH), or P(S)(OH);
[0850] R is —O(R^{a}) or —C₁₋₆alkyl-O(R^{a}), wherein R^{a} is hydrogen or a hydroxyl protecting group; and
[0851] R^{T1} is as defined for Formula (X).

[0852] In some embodiments, -L′-R^{T} is

[chemical structure]

[0853] wherein* is the bond to ZZ;
   [0854] L¹ is a bond, C(O), C(S), S(O)₂, P(O)(OH), or P(S)(OH);
   [0855] R is —O(R^{a}) or —C₁₋₆alkyl-O(R^{a}), wherein R^{a} is hydrogen or a hydroxyl protecting group; and
   [0856] R^{T1} is as defined for Formula (X).

[0857] In some embodiments, -L′-R^{T} is

[chemical structure]

wherein
[0858] * is the bond to ZZ;
[0859] q is 1, 2, 3, 4, 5, 6, 7, 8, 9, or 10 (e.g., an integer from 1 to 8, an integer from 1 to 5, or an integer from 1 to 3);
[0860] each L² is
   [0861] (i) independently selected from the group consisting of —C(O)O—, —OC(O)—, —C(O)N(R^{N})—, —N(R^{N})C(O)—, —OC(O)O—, —OC(O)N(R^{N})—, —N(R^{N})C(O)O—, —N(R^{N})C(O)N(R^{N})—, —OP(O)(OH)O—, —OP(S)(OH)O—, —O—, and —N(R^{N})—, wherein each R^{N} is independently hydrogen or C₁₋₆alkyl; or
   [0862] (ii) independently selected from the group consisting of —C(O)O—, —OC(O)—, —C(O)N(R^{N})—, —N(R^{N})C(O)—, —OC(O)N(R^{N})—, —N(R^{N})C(O)O—, —N(R^{N})C(O)N(R^{N})—, —O—, and —N(R^{N})—, wherein each R^{N} is independently hydrogen or C₁₋₆alkyl; or
   [0863] (iii) is independently selected from the group consisting of —C(O)N(R^{N})—, —N(R^{N})C(O)—, —OC(O)N(R^{N})—, —N(R^{N})C(O)O—, —N(R^{N})C(O)N(R^{N})—, —O—, and —N(R^{N})—, wherein each R^{N} is independently hydrogen or C₁₋₆alkyl; or
   [0864] (iv) independently selected from the group consisting of —C(O)O—, —OC(O)—, —C(O)N(R^{N})—, —N(R^{N})C(O)—, —O—, and —N(R^{N})—, wherein each R^{N} is independently hydrogen or C₁₋₆alkyl; or
   [0865] (v) independently selected from the group consisting of —C(O)N(R^{N})—, —N(R^{N})C(O)—, —O—, and —N(R^{N})—, wherein each R^{N} is independently hydrogen or C₁₋₆alkyl;
   [0866] (vi) independently selected from the group consisting of —C(O)N(R^{N})— and —N(R^{N})C(O), wherein each R^{N} is independently hydrogen or C₁₋₆alkyl;
[0867] L¹ is a bond, C(O), C(S), S(O)₂, P(O)(OH), or P(S)(OH); and R^{T1} is as defined for Formula (X).

[0868] In some embodiments, -L′-R^{T} is

[chemical structure]

wherein
[0869] * is the bond to ZZ;
[0870] q is 1, 2, 3, 4, 5, 6, 7, 8, 9, or 10 (e.g., an integer from 1 to 8, an integer from 1 to 5, or an integer from 1 to 3);
[0871] each L² is
   [0872] (i) independently selected from the group consisting of —C(O)O—, —OC(O)—, —C(O)N(R^{N})—, —N(R^{N})C(O)—, —OC(O)O—, —OC(O)N(R^{N})—, —N(R^{N})C(O)O—, —N(R^{N})C(O)N(R^{N})—, —OP(O)(OH)O—, —OP(S)(OH)O—, —O—, and —N(R^{N})—, wherein each R^{N} is independently hydrogen or C₁₋₆alkyl; or
   [0873] (ii) independently selected from the group consisting of —C(O)O—, —OC(O)—, —C(O)N(R^{N})—, —N(R^{N})C(O)—, —OC(O)N(R^{N})—, —N(R^{N})COO, N(R^{N})C(O)N(R^{N})—, —O—, and —N(R^{N})—, wherein each R^{N} is independently hydrogen or C₁₋₆alkyl; or
   [0874] (iii) is independently selected from the group consisting of —C(O)N(R^{N})—, —N(R^{N})C(O)—, —OC(O)N(R^{N})—, —N(R^{N})C(O)O—, —N(R^{N})C(O)N(R^{N})—, —O—, and —N(R^{N})—, wherein each R^{N} is independently hydrogen or C₁₋₆alkyl; or
   [0875] (iv) independently selected from the group consisting of —C(O)O—, —OC(O)—, —C(O)N(R^{N})—, —N(R^{N})C(O)—, —O—, and —N(R^{N})—, wherein each R^{N} is independently hydrogen or C₁₋₆alkyl; or
   [0876] (v) independently selected from the group consisting of —C(O)N(R^{N})—, —N(R^{N})C(O)—, —O—, and —N(R^{N})—, wherein each R^{N} is independently hydrogen or C₁₋₆alkyl;
   [0877] (vi) independently selected from the group consisting of —C(O)N(R^{N})— and —N(R^{N})C(O), wherein each R^{N} is independently hydrogen or C₁₋₆alkyl;
[0878] L¹ is a bond, C(O), C(S), S(O)₂, P(O)(OH), or P(S)(OH); and
   R^{T1} is as defined for Formula (X). In some embodiments, -L′-R^{T} is

[chemical structure]

wherein
[0879] * is the bond to ZZ;
[0880] q is 1, 2, 3, 4, 5, 6, 7, 8, 9, or 10 (e.g., an integer from 1 to 8, an integer from 1 to 5, or an integer from 1 to 3);
[0881] each L² is
   [0882] (i) independently selected from the group consisting of —C(O)O—, —OC(O)—, —C(O)N(R^{N})—, —N(R^{N})C(O)—, —OC(O)O—, —OC(O)N(R^{N})—, —N(R^{N})C(O)O—, —N(R^{N})C(O)N(R^{N})—, —OP(O)(OH)O—, —OP(S)(OH)O—, —O—, and —N(R^{N})—, wherein each R^{N} is independently hydrogen or C₁₋₆alkyl; or
   [0883] (ii) independently selected from the group consisting of —C(O)O—, —OC(O)—, —C(O)N(R^{N})—, —N(R^{N})C(O)—, —OC(O)N(R^{N})—, —N(R^{N})COO, N(R^{N})C(O)N(R^{N})—, —O—, and —N(R^{N})—, wherein each R^{N} is independently hydrogen or C₁₋₆alkyl; or
   [0884] (iii) is independently selected from the group consisting of —C(O)N(R^{N})—, —N(R^{N})C(O)—, —OC(O)N(R^{N})—, —N(R^{N})C(O)O—, —N(R^{N})C(O)N(R^{N})—, —O—, and —N(R^{N})—, wherein each R^{N} is independently hydrogen or C₁₋₆alkyl; or
   [0885] (iv) independently selected from the group consisting of —C(O)O—, —OC(O)—, —C(O)N(R^{N})—, —N(R^{N})C(O)—, —O—, and —N(R^{N})—, wherein each R^{N} is independently hydrogen or C₁₋₆alkyl; or
   [0886] (v) independently selected from the group consisting of —C(O)N(R^{N})—, —N(R^{N})C(O)—, —O—, and —N(R^{N})—, wherein each R^{N} is independently hydrogen or C₁₋₆alkyl;
   [0887] (vi) independently selected from the group consisting of —C(O)N(R^{N})— and —N(R^{N})C(O), wherein each R^{N} is independently hydrogen or C₁₋₆alkyl;
[0888] L¹ is a bond, C(O), C(S), S(O)₂, P(O)(OH), or P(S)(OH); and
[0889] R^{T1} is hydrogen.

[0890] In some embodiments, -L′-R^{T} is

[chemical structure]

wherein * is the bond to ZZ;
[0891] q is 1, 2, 3, 4, 5, 6, 7, 8, 9, or 10 (e.g., 1-8; or 1-5; or 1-3);
[0892] each L² is
   [0893] (i) independently selected from the group consisting of —C(O)O—, —OC(O)—, —C(O)N(R^{N})—, —N(R^{N})C(O)—, —OC(O)O—, —OC(O)N(R^{N})—, —N(R^{N})C(O)O—, —N(R^{N})C(O)N(R^{N})—, —OP(O)(OH)O—, —OP(S)(OH)O—, —O—, and —N(R^{N})—, wherein each R^{N} is independently hydrogen or C₁₋₆alkyl; or
   [0894] (ii) independently selected from the group consisting of —C(O)O—, —OC(O)—, —C(O)N(R^{N})—, —N(R^{N})C(O)—, —OC(O)N(R^{N})—, —N(R^{N})COO, N(R^{N})C(O)N(R^{N})—, —O—, and —N(R^{N})—, wherein each R^{N} is independently hydrogen or C₁₋₆alkyl; or
   [0895] (iii) is independently selected from the group consisting of —C(O)N(R^{N})—, —N(R^{N})C(O)—, —OC(O)N(R^{N})—, —N(R^{N})C(O)O—, —N(R^{N})C(O)N(R^{N})—, —O—, and —N(R^{N})—, wherein each R^{N} is independently hydrogen or C₁₋₆alkyl; or
   [0896] (iv) independently selected from the group consisting of —C(O)O—, —OC(O)—, —C(O)N(R^{N})—, —N(R^{N})C(O)—, —O—, and —N(R^{N})—, wherein each R^{N} is independently hydrogen or C₁₋₆alkyl; or
   [0897] (v) independently selected from the group consisting of —C(O)N(R^{N})—, —N(R^{N})C(O)—, —O—, and —N(R^{N})—, wherein each R^{N} is independently hydrogen or C₁₋₆alkyl;
   [0898] (vi) independently selected from the group consisting of —C(O)N(R^{N})— and —N(R^{N})C(O), wherein each R^{N} is independently hydrogen or C₁₋₆alkyl;
[0899] L¹ is a bond, C(O), C(S), S(O)₂, P(O)(OH), or P(S)(OH);
[0900] R is —O(R^{a}) or —C₁₋₆alkyl-O(R^{a}), wherein R^{a} is hydrogen or a hydroxyl protecting group; and
   R^{T1} is as defined for Formula (X).

[0901] In some embodiments, -L′-R^{T} is

[chemical structure]

wherein * is the bond to ZZ;
[0902] q is 1, 2, 3, 4, 5, 6, 7, 8, 9, or 10 (e.g., an integer from 1 to 8, an integer from 1 to 5, or an integer from 1 to 3);
[0903] each L² is
   [0904] (i) independently selected from the group consisting of —C(O)O—, —OC(O)—, —C(O)N(R^{N})—, —N(R^{N})C(O)—, —OC(O)O—, —OC(O)N(R^{N})—, —N(R^{N})C(O)O—, —N(R^{N})C(O)N(R^{N})—, —OP(O)(OH)O—, —OP(S)(OH)O—, —O—, and —N(R^{N})—, wherein each R^{N} is independently hydrogen or C₁₋₆alkyl; or
   [0905] (ii) independently selected from the group consisting of —C(O)O—, —OC(O)—, —C(O)N(R^{N})—, —N(R^{N})C(O)—, —OC(O)N(R^{N})—, —N(R^{N})C₀₀, N(R^{N})C(O)N(R^{N})—, —O—, and —N(R^{N})—, wherein each R^{N} is independently hydrogen or C₁₋₆alkyl; or
   [0906] (iii) is independently selected from the group consisting of —C(O)N(R^{N})—, —N(R^{N})C(O)—, —OC(O)N(R^{N})—, —N(R^{N})C(O)O—, —N(R^{N})C(O)N(R^{N})—, —O—, and —N(R^{N})—, wherein each R^{N} is independently hydrogen or C₁₋₆alkyl; or
   [0907] (iv) independently selected from the group consisting of —C(O)O—, —OC(O)—, —C(O)N(R^{N})—, —N(R^{N})C(O)—, —O—, and —N(R^{N})—, wherein each R^{N} is independently hydrogen or C₁₋₆alkyl; or
   [0908] (v) independently selected from the group consisting of —C(O)N(R^{N})—, —N(R^{N})C(O)—, —O—, and —N(R^{N})—, wherein each R^{N} is independently hydrogen or C₁₋₆alkyl;
   [0909] (vi) independently selected from the group consisting of —C(O)N(R^{N})— and —N(R^{N})C(O), wherein each R^{N} is independently hydrogen or C₁₋₆alkyl;
[0910] L¹ is a bond, C(O), C(S), S(O)₂, P(O)(OH), or P(S)(OH);
[0911] R is —O(R^{a}) or —C₁₋₆alkyl-O(R^{a}), wherein R^{a} is hydrogen or a hydroxyl protecting group; and
[0912] R^{T1} is as defined for Formula (X).

[0913] In some embodiments, -L′-R^{T} is

[chemical structure]

wherein* is the bond to ZZ;
[0914] q is 1, 2, 3, 4, 5, 6, 7, 8, 9, or 10 (e.g., an integer from 1 to 8, an integer from 1 to 5, or an integer from 1 to 3);
[0915] each L² is
   [0916] (i) independently selected from the group consisting of —C(O)O—, —OC(O)—, —C(O)N(R^{N})—, —N(R^{N})C(O)—, —OC(O)O—, —OC(O)N(R^{N})—, —N(R^{N})C(O)O—, —N(R^{N})C(O)N(R^{N})—, —OP(O)(OH)O—, —OP(S)(OH)O—, —O—, and —N(R^{N})—, wherein each R^{N} is independently hydrogen or C₁₋₆alkyl; or
   [0917] (ii) independently selected from the group consisting of —C(O)O—, —OC(O)—, —C(O)N(R^{N})—, —N(R^{N})C(O)—, —OC(O)N(R^{N})—, —N(R^{N})C₀₀, N(R^{N})C(O)N(R^{N})—, —O—, and —N(R^{N})—, wherein each R^{N} is independently hydrogen or C₁₋₆alkyl; or
   [0918] (iii) is independently selected from the group consisting of —C(O)N(R^{N})—, —N(R^{N})C(O)—, —OC(O)N(R^{N})—, —N(R^{N})C(O)O—, —N(R^{N})C(O)N(R^{N})—, —O—, and —N(R^{N})—, wherein each R^{N} is independently hydrogen or C₁₋₆alkyl; or
   [0919] (iv) independently selected from the group consisting of —C(O)O—, —OC(O)—, —C(O)N(R^{N})—, —N(R^{N})C(O)—, —O—, and —N(R^{N})—, wherein each R^{N} is independently hydrogen or C₁₋₆alkyl; or
   [0920] (v) independently selected from the group consisting of —C(O)N(R^{N})—, —N(R^{N})C(O)—, —O—, and —N(R^{N})—, wherein each R^{N} is independently hydrogen or C₁₋₆alkyl;
   [0921] (vi) independently selected from the group consisting of —C(O)N(R^{N})— and —N(R^{N})C(O), wherein each R^{N} is independently hydrogen or C₁₋₆alkyl;
[0922] L¹ is a bond, C(O), C(S), S(O)₂, P(O)(OH), or P(S)(OH);
[0923] R is —O(R^{a}) or —C₁₋₆alkyl-O(R^{a}), wherein R^{a} is hydrogen or a hydroxyl protecting group; and
   R^{T1} is as defined for Formula (X). In some embodiments, -L′-R^{T} is

[chemical structure]

wherein* is the bond to ZZ;
[0924] q is 1, 2, 3, 4, 5, 6, 7, 8, 9, or 10 (e.g., an integer from 1 to 8, an integer from 1 to 5, or an integer from 1 to 3);
[0925] each L² is
   [0926] (i) independently selected from the group consisting of —C(O)O—, —OC(O)—, —C(O)N(R^{N})—, —N(R^{N})C(O)—, —OC(O)O—, —OC(O)N(R^{N})—, —N(R^{N})C(O)O—, —N(R^{N})C(O)N(R^{N})—, —OP(O)(OH)O—, —OP(S)(OH)O—, —O—, and —N(R^{N})—, wherein each R^{N} is independently hydrogen or C₁₋₆alkyl; or
   [0927] (ii) independently selected from the group consisting of —C(O)O—, —OC(O)—, —C(O)N(R^{N})—, —N(R^{N})C(O)—, —OC(O)N(R^{N})—, —N(R^{N})COO, N(R^{N})C(O)N(R^{N})—, —O—, and —N(R^{N})—, wherein each R^{N} is independently hydrogen or C₁₋₆alkyl; or
   [0928] (iii) is independently selected from the group consisting of —C(O)N(R^{N})—, —N(R^{N})C(O)—, —OC(O)N(R^{N})—, —N(R^{N})C(O)O—, —N(R^{N})C(O)N(R^{N})—, —O—, and —N(R^{N})—, wherein each R^{N} is independently hydrogen or C₁₋₆alkyl; or
   [0929] (iv) independently selected from the group consisting of —C(O)O—, —OC(O)—, —C(O)N(R^{N})—, —N(R^{N})C(O)—, —O—, and —N(R^{N})—, wherein each R^{N} is independently hydrogen or C₁₋₆alkyl; or
   [0930] (v) independently selected from the group consisting of —C(O)N(R^{N})—, —N(R^{N})C(O)—, —O—, and —N(R^{N})—, wherein each R^{N} is independently hydrogen or C₁₋₆alkyl;
   [0931] (vi) independently selected from the group consisting of —C(O)N(R^{N})— and —N(R^{N})C(O), wherein each R^{N} is independently hydrogen or C₁₋₆alkyl;
[0932] L¹ is a bond, C(O), C(S), S(O)₂, P(O)(OH), or P(S)(OH);
[0933] R is —O(R^{a}) or —C₁₋₆alkyl-O(R^{a}), wherein R^{a} is hydrogen or a hydroxyl protecting group; and
   R^{T1} is as defined for Formula (X).

[0934] In some embodiments, -L′-R^{T} is

[chemical structure]

wherein* is the bond to ZZ;
[0935] L¹ is a bond, C(O), C(S), S(O)₂, P(O)(OH), or P(S)(OH);
[0936] R is —O(R^{a}) or —C₁₋₆alkyl-O(R^{a}), wherein R^{a} is hydrogen or a hydroxyl protecting group; and
[0937] R^{T1} is as defined for Formula (X).

### R^{L} Embodiments, Formula (X)

[0938] In one embodiment the Formula (X), or a salt thereof, R^{L} is —N(R³)(R⁴), —O(R⁵), —S(R⁵), or —R⁵, wherein R⁵ is according to one Formulae (x-a) through (x-s):

[chemical structure]

[chemical structure]

[chemical structure]

wherein R^{P3} is hydrogen or a hydroxyl protecting group and L, ZZ, L′ and R^{T1} are as defined for Formula (X) or any embodiment herein.

[0939] In another embodiment, R^{L} is according to one of Formulae (xi-a) through xi-n):

[chemical structure]

[chemical structure]

wherein R^{P3} is hydrogen or a hydroxyl protecting group, and L, ZZ, L′ and R^{T1} are as defined for Formula (X) or any embodiment herein.

### L Embodiments, Formula (X)

[0940] In some embodiments of any one of Formula (X) and any embodiments thereof, L is -L¹-[G-L²]_{q}-G-L³-*, wherein * is the bond to ZZ.

[0941] In another embodiment, wherein L is -L¹-[G-L²]_{q}-G-L³-*, wherein q is 0, 1, 2, 3, 4, or 5.

[0942] In another embodiment, L is -L¹-[G-L²]_{q}-G-L³-*, wherein q is 0, 1, 2, 3, or 4

[0943] In another embodiment, L is -L¹-[G-L²]_{q}-G-L³-*, wherein q is 0, 1, 2, or 3.

[0944] In another embodiment, L is -L¹-[G-L²]_{q}-G-L³-*, wherein q is 0, 1, or 2.

[0945] In another embodiment, L is -L¹-[G-L²]_{q}-G-L³-*, wherein q is 1, 2, 3, 4, or 5.

[0946] In another embodiment, L is -L¹-[G-L²]_{q}-G-L³-*, wherein q is 1, 2, 3, or 4.

[0947] In another embodiment, L is -L¹-[G-L²]_{q}-G-L³-*, wherein q is 1, 2, or 3.

[0948] In another embodiment, L is -L¹-[G-L²]_{q}-G-L³-*, wherein q is 1 or 2.

[0949] In another embodiment, L is -L¹-[G-L²]_{q}-G-L³-*, wherein q is 4. In another embodiment, L is -L¹-[G-L²]_{q}-G-L³-*, wherein q is 3. In another embodiment, L is -L¹-[G-L²]_{q}-G-L³-*, wherein q is 2.

[0950] In another embodiment, L is -L¹-G-L²-G-L³-*. In another embodiment, L is -L¹-G-L³-*. In another embodiment, L is -G-L³-*. In another embodiment, L is -L¹-G-*. In another embodiment, L is -G-*.

[0951] In some embodiments, each instance of A-B-A- is independently selected from the group consisting of —C(O)O—, —OC(O)—, —C(O)N(R^{N})—, —N(R^{N})C(O)—, —OC(O)O—, —OC(O)N(R^{N})—, —N(R^{N})C(O)O—, —N(R^{N})C(O)N(R^{N})—, —OP(O)(OH)O—, —OP(S)(OH)O—, —O—, and —N(R^{N})—, wherein each R^{N} is independently hydrogen or C₁₋₆alkyl.

[0952] In some embodiments, each instance of A-B-A- is independently selected from the group consisting of —C(O)O—, —OC(O)—, —C(O)N(R^{N})—, —N(R^{N})C(O)—, —OC(O)N(R^{N})—, —N(R^{N})C(O)O—, —N(R^{N})C(O)N(R^{N})—, —O—, and —N(R^{N})—, wherein each R^{N} is independently hydrogen or C₁₋₆alkyl.

[0953] In some embodiments, each instance of A-B-A- is independently selected from the group consisting of —C(O)N(R^{N})—, —N(R^{N})C(O)—, —OC(O)N(R^{N})—, —N(R^{N})C(O)O—, —N(R^{N})C(O)N(R^{N})—, —O—, and —N(R^{N})—, wherein each R^{N} is independently hydrogen or C₁₋₆alkyl.

[0954] In some embodiments, each instance of A-B-A- is independently selected from the group consisting of —C(O)O—, —OC(O)—, —C(O)N(R^{N})—, —N(R^{N})C(O)—, —O—, and —N(R^{N})—, wherein each R^{N} is independently hydrogen or C₁₋₆alkyl.

[0955] In some embodiments, each instance of A-B-A- is independently selected from the group consisting of —C(O)N(R^{N})—, —N(R^{N})C(O)—, —O—, and —N(R^{N})—, wherein each R^{N} is independently hydrogen or C₁₋₆alkyl.

[0956] In some embodiments,
[0957] D and F are each independently a bond, C₁₋₁₀alkyl, C₂₋₁₀alkenyl, or C₂₋₁₀alkynyl, each optionally substituted with 1, 2, 3, or 4 R groups; and
[0958] E is C₁₋₁₀alkyl, C₂₋₁₀alkenyl, C₂₋₁₀alkynyl, C₃₋₁₀cycloalkyl, 3-10 membered heterocyclyl, aryl, or heteroaryl, each of which is optionally substituted with 1, 2, 3, or 4 R groups.

[0959] In some embodiments,
[0960] D and F are each independently a bond or C₁₋₁₀alkyl optionally substituted with 1, 2, 3, or 4 R groups; and
[0961] E is C₁₋₁₀alkyl, C₂₋₁₀alkenyl, C₂₋₁₀alkynyl, C₃₋₁₀cycloalkyl, 3-10 membered heterocyclyl, aryl, or heteroaryl, each of which is optionally substituted with 1, 2, 3, or 4 R groups.

[0962] In some embodiments, each G is independently C₁₋₁₀alkyl, C₂₋₁₀alkenyl, C₂₋₁₀alkynyl, C₃₋₁₀cycloalkyl, 3-10 membered heterocyclyl, aryl, or heteroaryl, each of which is optionally substituted with 1, 2, 3, or 4 R groups.

[0963] In some embodiments, each G is independently C₁₋₁₀alkyl, optionally substituted with 1, 2, or 3 R groups.

[0964] In some embodiments, each G is independently C₁₋₁₀alkyl, optionally substituted with 1 or 2 R groups.

[0965] In some embodiments, each G is independently C₁₋₁₀alkyl, optionally substituted with one R group

[0966] In some embodiments, L is -L1-G-L³-*, wherein * is the bond to ZZ;
[0967] G is -D-E-F-, wherein D, E, and F are independently a bond, C₁₋₁₀alkyl, C₂₋₁₀alkenyl, C₂₋₁₀alkynyl, C₃₋₁₀cycloalkyl, 3-10 membered heterocyclyl, aryl, or heteroaryl, each of which is optionally substituted with 1, 2, 3, or 4 R groups;
[0968] L¹ is -B-A-;
[0969] L³ is a bond or -A-B-A-;
[0970] each A is independently a bond, —O—, —S—, or —N(R^{N})—, wherein each R^{N} is independently hydrogen or C₁₋₆alkyl.
[0971] each B is independently a bond, CH₂, C(O), S(O)₂, P(O)(OH), or P(S)(OH); and

[0972] In some embodiments, L is -L1-G-L³-*, wherein * is the bond to ZZ;
[0973] G is C₁₋₁₀alkyl, C₂₋₁₀alkenyl, C₂₋₁₀alkynyl, C₃₋₁₀cycloalkyl, 3-10 membered heterocyclyl, aryl, or heteroaryl, each of which is optionally substituted with 1, 2, 3, or 4 R groups;
[0974] L¹ is -B-;
[0975] L³ is a bond or -A-B-A-;
[0976] each A is independently a bond, —O—, —S—, or —N(R^{N})—, wherein each R^{N} is independently hydrogen or C₁₋₆alkyl; and
[0977] each B is independently a bond, CH₂, C(O), S(O)₂, P(O)(OH), or P(S)(OH; and

[0978] In some embodiments, L is -L¹-G-*, wherein * is the bond to ZZ;
[0979] G is C₁₋₁₀alkyl, C₂₋₁₀alkenyl, C₂₋₁₀alkynyl, C₃₋₁₀cycloalkyl, 3-10 membered heterocyclyl, aryl, or heteroaryl, each of which is optionally substituted with 1, 2, 3, or 4 R groups;
[0980] L¹ is -B-A-, wherein,
   [0981] A is a bond, —O—, —S—, or —N(R^{N})—, wherein each R^{N} is independently hydrogen or C₁₋₆ alkyl; and
   [0982] B is a bond, C(O), C(S), S(O)₂, P(O)(OH), or P(S)(OH).

[0983] In some embodiments, L is -L¹-G-*, wherein * is the bond to ZZ;
[0984] G is C₁₋₁₀alkyl, C₂₋₁₀alkenyl, C₂₋₁₀alkynyl, each of which is optionally substituted with 1 or 2 R groups;
[0985] L¹ is -B-A-, wherein
   [0986] A is a bond, —O—, —S—, or —N(R^{N})—, each R^{N} is independently hydrogen or C₁₋₆alkyl; and
   [0987] B is a bond, C(O), S(O)₂, P(O)(OH), or P(S)(OH).

[0988] In some embodiments L is -L¹-G-*, wherein * is the bond to ZZ;
[0989] G is C₁₋₁₀alkyl or C₂₋₁₀alkenyl, each of which is optionally substituted with 1 or 2 R groups;
[0990] L¹ is bond, C(O), S(O)₂, P(O)(OH), or P(S)(OH); and
[0991] R^{N} is hydrogen or C₁₋₆alkyl.

[0992] In some embodiments, L is

[chemical structure]

wherein * is the bond to ZZ; k is an integer from 1 to 10; L¹ is bond, C(O), C(S), C(NR^{N}), S(O)₂, P(O)(OH), or P(S)(OH); and R^{N} is hydrogen or C₁₋₆ alkyl.

[0993] In some embodiments, L is

[chemical structure]

wherein * is the bond to ZZ; k is an integer from 1 to 10; L¹ is bond, C(O), P(O)(OH), or P(S)(OH).

[0994] In some embodiments, L is

[chemical structure]

wherein * is the bond to ZZ; k is an integer from 1 to 10; or an integer from 2 to 10; or an integer from 3 to 10; or an integer from 4 to 10; or an integer from 5 to 10; or an integer from 5 to 9; or an integer from 5 to 8; or an integer from 5 to 7.

[0995] In some embodiments, L is

[chemical structure]

wherein * is the bond to ZZ; t is an integer from 0 to 10 (e.g., an integer from 1 to 5; or 1; or 2; or 3).

[0996] In some embodiments, L is

[chemical structure]

wherein * is the bond to ZZ, t is an integer from 0 to 10 (e.g., an integer from 1 to 5 or 1; or 2; or 3); a is an integer from 1 to 3; and s and s′ are each independently an integer from 1 to 24 (e.g., an integer from 1 to 16; an integer from 1 to 10; an integer from 3 to 10; an integer from 3 to 7; or an integer from 4 to 6).

[0997] In some embodiments, L is

[chemical structure]

wherein * is the bond to ZZ; a is 1, 2 or 3; and each s, s′, and s″ independently is an integer from 1 to 24 (e.g., an integer from 1 to 16, an integer from 1 to 10, an integer from 3 to 10, an integer from 3 to 7, or an integer from 4 to 6).

[0998] In some embodiments, L is

[chemical structure]

wherein * is the bond to ZZ; and s, s′, and s″ are independently is an integer from 1 to 24 (e.g., an integer from 1 to 16, an integer from 1 to 10, an integer from 3 to 10, an integer from 3 to 7, or an integer from 4 to 6).

[0999] In some embodiments, L is

[chemical structure]

wherein * is the bond to ZZ and each s, s′, and s″ independently is an integer from 1 to 24 (e.g., an integer from 1 to 16, an integer from 1 to 10, an integer from 3 to 10, an integer from 3 to 7, or an integer from 4 to 6)

[1000] In some embodiments, L is

[chemical structure]

wherein * is the bond to ZZ; s and k are independently is an integer from 1 to 20 (e.g., an integer from 1 to 16, an integer from 1 to 10, an integer from 3 to 10, an integer from 3 to 7 or an integer from 4 to 6); and w is an integer from 1 to 10 (e.g., an integer from 1 to 16, an integer from 1 to 10, an integer from 3 to 10, an integer from 3 to 7 or an integer from 4 to 6).

[1001] In some embodiments, L is

[chemical structure]

wherein * is the bond to ZZ and w is an integer from 1 to 20 (e.g., an integer from 1 to 16, an integer from 1 to 10, an integer from 3 to 10, an integer from 3 to 7 or an integer from 4 to 6).

### R^{P3} Embodiments, Formula (X)

[1002] In embodiments of Formula (X), including embodiments of Formulae (x-a) through (x-s) and (xi-a) through (xi-m), R^{P3}, when present, is hydrogen.

[1003] In another embodiment, R^{P3}, when present, is a hydroxyl protecting group.

[1004] In another embodiment, R^{P3}, when present, is a hydroxyl protecting group selected from the group consisting of acetyl, trifluoroacetyl, trichloroacetyl, pivaloyl, t-butyl, allyl, optionally substituted benzyl (such as benzyl, 2-nitrobenzyl, 4-nitrobenzyl, 2,6-dichlorobenzyl, 4-chlorobenzyl, 4-fluorobenzyl, 4-bromobenzyl, 4-methoxybenzyl, 3,4-dimethoxybenzyl, 2-cyanobenzyl, 4-cyanobenzyl, 4-phenylbenzyl), 2-picolyl, and 4-picolyl.

[1005] In another embodiment, R^{P3}, when present, is a hydroxyl protecting group selected from the group consisting of methoxymethyl (MOM), methylthiomethyl (MTM), ethoxymethyl, 2-methoxyethoxymethyl (MEM), 2,2,2-trichloroethoxymethyl, t-butoxymethyl, benzyloxymethyl (BOM), 4-methoxybenzyloxymethyl (Mbom), (phenyldimethylsilyl)methoxymethyl (SMOM), 2-(Trimethylsilyl)ethoxymethyl (SEM), and t-butylthiomethyl,

[1006] In another embodiment, R^{P3}, when present, is a hydroxyl protecting group selected from the group consisting of 2-tetrahydropyranyl (THP), 4-methoxytetrahydropyran-2-yl (MTHP), 4-methoxytetrahydrothiopyran-2-yl, 3-bromotetrahydropyran-2-yl, and 2-tetrahydrothiopyranyl.

[1007] In another embodiment, R^{P3}, when present, is a hydroxyl protecting group selected from the group consisting of trimethylsilyl (TMS), triethylsilyl (TES), triisopropylsilyl (TIPS), t-butyldimethylsilyl (TBDMS), t-butyldiphenylsilyl (TBDPS), Isopropyldimethylsilyl (IPDMS), and diethylisopropylsilyl (DEIPS).

[1008] In another embodiment, R^{P3}, when present, is a hydroxyl protecting group selected from the group consisting of diphenylmethyl, 9-phenylxanthine-9-yl (Pixyl), 9-(p-methoxyphenyl)xanthine-9-yl (MOX), and optionally substituted trityl (e.g., trityl (Trt), 2-chlorotrityl (Clt), 4′-methoxytrityl (Mmt), 4′-methyltrityl (Mtt), 4,4′-dimethoxytrityl (DMT)), and 4,4′,4″-trimethoxytrityl.

[1009] In another embodiment, R^{P3}, when present, is an optionally substituted trityl group (e.g., trityl (Trt), 2-chlorotrityl (Clt), 4-methoxytrityl (Mint), 4-methyltrityl (Mtt), 4,4′-dimethoxytrityl (DMT)), or 4,4′,4″-trimethoxytrityl).

[1010] In another embodiment, R^{P3}, when present, is a 4,4′-dimethoxytrityl (DMT) group.

[1011] In another embodiment, the compound of Formula (X) is according to one of Formulae (X-b) through (X-e) and (X-x):

[chemical structure]

[chemical structure]

or a salt thereof, wherein R^{P} is hydrogen or a nitrogen protecting group (e.g., a nitrogen protecting group), wherein R and the remaining variables are as defined in Formula (X). In one embodiment of Formulae (X-b) through (X-e) and (X-x), R¹ is hydrogen. In another embodiment of Formulae (X-b) through (X-e) and (X-x), R¹ is C₁₋₆alkyl (e.g., methyl or t-butyl). In another embodiment of Formulae (X-b) through (X-e) and (X-x), R¹ is hydrogen and R^{P} is hydrogen. In another embodiment of Formulae (X-b) through (X-e) and (X-x), R¹ is hydrogen and a nitrogen protecting group. In another embodiment of Formulae (X-b) through (X-e) and (X-x), R¹ is C₁₋₆alkyl (e.g., methyl or t-butyl) and R^{P} is hydrogen. In another embodiment of Formulae (X-b) through (X-e) and (X-x), R¹ is C₁₋₆alkyl (e.g., methyl or t-butyl) and a nitrogen protecting group.

### -L-ZZ-L′-R^{T} Embodiments

[1012] In an embodiment, of any one of Formula (X) and Formulae (X-a) through (X-e) and (X-x), -L-ZZ-L′-R^{T} is

[chemical structure]

[1013] In an embodiment, of any one of Formula (X) and Formulae (X-a) through (X-e) and (X-x), -L-ZZ-L′-R^{T} is

[chemical structure]

[1014] In an embodiment, of any one of Formula (X) and Formulae (X-a) through (X-e) and (X-x), -L-ZZ-L′-R^{T} is

[chemical structure]

[1015] In an embodiment, of any one of Formula (X) and Formulae (X-a) through (X-e) and (X-x), -L-ZZ-L′-R^{T} is

[chemical structure]

[1016] In an embodiment, of any one of Formula (X) and Formulae (X-a) through (X-e) and (X-x), -L-ZZ-L′-R^{T} is

[chemical structure]

[1017] In an embodiment, of any one of Formula (X) and Formulae (X-a) through (X-e) and (X-x), -L-ZZ-L′-R^{T} is

[chemical structure]

[1018] In an embodiment, of any one of Formula (X) and Formulae (X-a) through (X-e) and (X-x), -L-ZZ-L′-R^{T} is

[chemical structure]

[1019] In an embodiment, of any one of Formula (X) and Formulae (X-a) through (X-e) and (X-x), -L-ZZ-L′-R^{T} is

[chemical structure]

[1020] In an embodiment, of any one of Formula (X) and Formulae (X-a) through (X-e) and (X-x), -L-ZZ-L′-R^{T} is

[chemical structure]

[1021] In an embodiment, of any one of Formula (X) and Formulae (X-a) through (X-e) and (X-x), -L-ZZ-L′-R^{T} is

[chemical structure]

[1022] In an embodiment, of any one of Formula (X) and Formulae (X-a) through (X-e) and (X-x), -L-ZZ-L′-R^{T} is

[chemical structure]

[1023] In an embodiment, of any one of Formula (X) and Formulae (X-a) through (X-e) and (X-x), -L-ZZ-L′-R^{T} is

[chemical structure]

[1024] In an embodiment, of any one of Formula (X) and Formulae (X-a) through (X-e) and (X-x), -L-ZZ-L′-R^{T} is

[chemical structure]

[1025] In an embodiment, of any one of Formula (X) and Formulae (X-a) through (X-e) and (X-x), -L-ZZ-L′-R^{T} is

[chemical structure]

[1026] In an embodiment, of any one of Formula (X) and Formulae (X-a) through (X-e) and (X-x), -L-ZZ-L′-R^{T} is

[chemical structure]

[1027] In an embodiment, of any one of Formula (X) and Formulae (X-a) through (X-e) and (X-x), -L-ZZ-L′-R^{T} is

[chemical structure]

[1028] In an embodiment, of any one of Formula (X) and Formulae (X-a) through (X-e) and (X-x), -L-ZZ-L′-R^{T} is

[chemical structure]

[1029] In an embodiment, of any one of Formula (X) and Formulae (X-a) through (X-e) and (X-x), -L-ZZ-L′-R^{T} is

[chemical structure]

[1030] In an embodiment, of any one of Formula (X) and Formulae (X-a) through (X-e) and (X-x), -L-ZZ-L′-R^{T} is

[chemical structure]

### R^{T1} Embodiments, Formula (X)

### Nucleotide CONJUGATES

[1031] In embodiments of any embodiments of R^{L} of Formula (X), Formula (X-a) through (X-e) and (X-x), Formula (x-a) through (x-s), and Formula (xi-a) through (xi-m),
[1032] R^{T1} is -L^{L}-oligonucleotide, wherein L^{L} is a divalent linker that connects to the 3′-end of the oligonucleotide, the 5′-end of the oligonucleotide, or an internal 2′- or 3′ position on a internal nucleotide (i.e., a nucleotide that is not the 5′-terminal or 3′-terminal nucleoside).

[1033] In some embodiments, R^{T1} is -L^{L}-oligonucleotide, wherein L^{L} is a divalent linker that connects to the 3′-end of the oligonucleotide, such as one of:
[1034] directly to the 3′-carbon of the 3′-terminal nucleoside;
[1035] directly to the 3′-O of the 3′-terminal nucleoside;
[1036] directly to the 4′-carbon of the 3′-terminal nucleoside;
[1037] directly to the 2′-carbon of the 3′-terminal nucleoside; or
[1038] directly to the 2′-O of the 3′-terminal nucleoside.

[1039] In some embodiments, R^{T1} is -L^{L}-oligonucleotide, wherein L^{L} is a divalent linker that connects to the 5′-end of the oligonucleotide, such as one of:
[1040] directly to the 5′-carbon of the 5′-terminal nucleoside;
[1041] directly to the 5′-O of the 5′-terminal nucleoside;
[1042] directly to the 4′-carbon of the 5′-terminal nucleoside;
[1043] directly to the 2′-carbon of the 5′-terminal nucleoside; or
[1044] directly to the 2′-O of the 5′-terminal nucleoside.

[1045] In some embodiments, R^{T1} is -L^{L}-oligonucleotide, wherein L^{L} is a divalent linker that connects to an internal 2′- or 3′ position on an internal nucleotide.

[1046] In some embodiments, R^{T1} is -L^{L}-oligonucleotide, wherein L^{L} is a divalent linker that connects to an internal 2′-position on a internal nucleotide.

[1047] In some embodiments, R^{T} is R^{T1}, wherein R^{T1} is -L^{L}-oligonucleotide, wherein L^{L} is a divalent linker that connects to an internucleotide linkage (i.e., to an oxygen atom in a phosphodiester linkage to form a phosphotriester; or to a nitrogen when the internucleotide linkage is a phosphoroamidate).

[1048] In another embodiment of any of the preceding embodiments of R^{T1}, when L^{L} connects to a carbon atom on a nucleoside, then L^{L} is -B³-A³-, wherein
[1049] B³ is —P(O)(OH)—, —P(S)(OH)—, or —P(S)(SH)—; and
[1050] A³ is —O—, —S—, or —N(H)—.

[1051] In another embodiment, when L^{L} connects to a carbon atom on a nucleoside, then L^{L} is -B³-A³-, wherein
[1052] B³ is —P(O)(OH)— or —P(S)(OH)—; and
[1053] A³ is —O—.

[1054] In another embodiment, when L^{L} connects to a oxygen atom on a nucleoside, then L^{L} is —P(O)(OH)—, —P(S)(OH)—, or —P(S)(SH).

[1055] In another embodiment, when L^{L} connects to a oxygen atom on a nucleoside, then L^{L} is —P(O)(OH)— or —P(S)(OH)—.

[1056] In another embodiment, when L^{L} connects to a oxygen atom on a nucleoside, then L^{L} is —P(O)(OH)—.

[1057] In another embodiment, when L^{L} connects to a oxygen atom on a nucleoside, then L^{L} is —P(S)(OH)—.

[1058] In another embodiment, when L^{L} connects to a oxygen atom on a nucleoside, then
[1059] L^{L} is -B³-A³-L^{L1}-A³-B³-, wherein
   [1060] B³ is a bond, —C(O)—, C(S)—, C(NH), S(O), S(O)₂, —P(O)(OH)—, —P(S)(OH)—, or —P(S)(SH);
   [1061] A³ is a bond, —O—, —S—, or —N(H)—; and
   [1062] L^{L1} is C₁₋₁₀alkyl, C₂₋₁₀alkenyl, C₂₋₁₀alkynyl, C₃₋₁₀cycloalkyl, 3-10 membered heterocyclyl, aryl, or heteroaryl.

[1063] In another embodiment, when L^{L} connects to a oxygen atom on a nucleoside, then L^{L} is -B³-L^{L1}-B³—, wherein B³ is —C(O)—; and L^{L1} is C₁₋₁₀alkyl.

[1064] In another embodiment, when L^{L} connects to a oxygen atom on a nucleoside, then L^{L} is a bond.

[1065] In certain embodiments, R^{T} is R^{T1} wherein R^{T1} is -L^{L}-oligonucleotide, when L^{L} connects to a oxygen atom on a nucleoside, and L L⁵ is a bond, the nucleoside is of Formula (X-f),

[chemical structure]

wherein B is an optionally modified nucleobase (e.g., adenine, cytosine, uracil, guanine, 5-methylcytosine, or -5-methyluracil); L¹ is according any of the preceding embodiments; and * represent the bond to ZZ.

[1066] In some embodiments of Formula (X-f), -L′- is -L′-G-L³-*, wherein * is the bond to ZZ.

[1067] In some embodiments, -L′- is —C₂₋₃₀alkyl-*, wherein the alkyl is optionally substituted with one or two R groups, and * is the bond to ZZ. In some embodiments, -L′- is —C₂₋₃₀alkyl-*, wherein the alkyl is optionally substituted with one or two groups selected from the group consisting of halogen, hydroxy, C₁₋₆alkoxy, amino, C₁₋₆alkylamino, di(C₁₋₆alkylamino), cyano, carboxy, and * is the bond to ZZ. In some embodiments, -L′- is —C₂₋₃₀alkyl-*, wherein the alkyl is optionally substituted with one group selected from the group consisting of halogen, hydroxy, C₁₋₆alkoxy, amino, C₁₋₆alkylamino, di(C₁₋₆ alkylamino), cyano, carboxy, and * is the bond to ZZ. In some embodiments, -L′- is —C₂₋₃₀alkyl-*, wherein the alkyl is optionally substituted with one group selected from the group consisting of hydroxy, amino, and carboxy, and * is the bond to ZZ. In some embodiments, -L′- is —C₂₋₃₀alkyl-*, wherein the alkyl is optionally substituted with hydroxy, and * is the bond to ZZ.

[1068] In some embodiments, -L′- is —C₂₋₃₀alkyl-*, wherein * is the bond to ZZ. In some embodiments, -L′- is —C₂₋₁₆alkyl-*, wherein * is the bond to ZZ. In some embodiments, -L′- is —C₄₋₁₂alkyl-*, wherein
[1069] * is the bond to ZZ. In some embodiments, -L′- is —C₄₋₁₀alkyl-*, wherein * is the bond to ZZ. In some embodiments, -L′- is —C₅₋₁₀alkyl-*, wherein * is the bond to ZZ. In some embodiments, -L′- is —C₆alkyl-*, wherein * is the bond to ZZ. In some embodiments, -L′- is —C₈alkyl-*, wherein * is the bond to ZZ. In some embodiments, -L′- is —C₁₀alkyl-*, wherein * is the bond to ZZ.

[1070] In some embodiments of Formula (X-f), -L′- is -L¹-[G-L²]_{q}-G-L³-*, wherein
[1071] * is the bond to ZZ;
[1072] q is 0, 1, 2, 3, 4, or 5;
[1073] L¹ is a bond or -B-A-;
[1074] each L² is independently -A-B-A-;
[1075] L³ is a bond or -A-B-A-;
[1076] each A is independently a bond, —O—, —S—, or —N(R^{N})—;
[1077] each B is independently a bond, CH₂, C(O), C(S), C(NR^{N}), S(O)₂, P(O)(OH), or P(S)(OH);
[1078] each R^{N} is independently hydrogen or C₁₋₆alkyl; and
[1079] each G is independently C₁₋₁₀alkyl, C₂₋₁₀alkenyl, C₂₋₁₀alkynyl, each of which is optionally substituted with 1, 2, 3, or 4 R groups.

[1080] In some embodiments, -L′- is -L¹-[G-L²]_{q}-G-*, wherein * is the bond to ZZ, q is 0, 1, 2, or 3; L¹ is a bond or -B-A-; and
[1081] (a) each L² is independently a bond, C(O)O, OC(O), C(O)(NR^{N}), N(R^{N})C(O), SO₂N(R^{N}), N(R^{N})SO₂, OP(O)(OH), OP(S)(OH), P(O)(OH)O, P(S)(OH)O, OP(O)(OH)O, or OP(S)(OH)O, wherein each R^{N} is independently hydrogen or C₁₋₆alkyl; each G is independently C₁₋₁₀alkyl, C₂₋₁₀alkenyl, C₂₋₁₀alkynyl, each of which is optionally substituted with 1 or 2 R groups;
[1082] or
[1083] (b) each L² is independently a bond, C(O)O, OC(O), C(O)(NR^{N}), N(R^{N})C(O), OP(O)(OH)O, or OP(S)(OH)O, wherein each R^{N} is independently hydrogen or C₁₋₆alkyl; and each G is independently C₁₋₁₀alkyl or C₂₋₁₀alkenyl, each of which is optionally substituted with 1 or 2 R groups.

[1084] In some embodiments, -L′- is -[G-L²]_{q}-G-*, wherein * is the bond to ZZ, q is 0, 1, 2, or 3 (e.g., q is 0, 1, or 2; or 0 or 1; or 0; or 1; or 2); each G is independently C₁₋₁₀alkyl, each of which is optionally substituted with 1 or 2 R groups. and
[1085] (a) each L² is independently C(O)O or OC(O);
[1086] (b) each L² is independently C(O)(NR^{N}) or N(R^{N})C(O), wherein each R^{N} is independently hydrogen or C₁₋₆alkyl
[1087] (c) each L² is independently OP(O)(OH)O, or OP(S)(OH)O (e.g., each is OP(O)(OH)O);
[1088] or
[1089] (d) each L² is a bond.

[1090] In some embodiments, the compound of Formula (X) is according to one of Formulae (X-g) through (X-q):

[chemical structure]

[chemical structure]

wherein
[1091] B is an optionally modified nucleobase (e.g., adenine, cytosine, uracil, guanine, 5-methylcytosine, or -5-methyluracil);
[1092] each n is independently 0 or an integer selected from 1-10; (e.g., 1-5, or 1-3, or 3, or 2, or 1);
[1093] each m is independently integer selected from 1-20 (e.g., 2-12, or 2-10; or 2-6; or 2; or 3; or 4; or 5; or 6).

[1094] In some embodiments, the compound of Formula (X) is according to one of Formulae (X-r) through (X-w):

[chemical structure]

[chemical structure]

or a salt thereof, wherein
[1095] L and ZZ are as defined in Formula (X) or in any embodiment preceding or below;
[1096] B is an optionally modified nucleobase (e.g., adenine, cytosine, uracil, guanine, 5-methylcytosine, or -5-methyluracil);
[1097] each m is independently integer selected from 1-20 (e.g., 2-12, or 2-10; or 2-6; or 2; or 3; or 4; or 5; or 6);
[1098] R^{P} is hydrogen or a nitrogen protecting group (e.g., a nitrogen protecting group); and
[1099] R¹ is hydrogen or C₁₋₆alkyl (e.g., methyl ort-butyl).

[1100] In one embodiment of Formulae (X-r) through (X-w), R¹ is hydrogen. In another embodiment of Formulae (X-r) through (X-w), R¹ is C₁₋₆alkyl (e.g., methyl ort-butyl). In another embodiment of Formulae (X-r) through (X-w), R¹ is hydrogen and R^{P} is hydrogen. In another embodiment of Formulae (X-r) through (X-w), R¹ is hydrogen and a nitrogen protecting group. In another embodiment of Formulae (X-r) through (X-w), R¹ is C₁₋₆alkyl (e.g., methyl or t-butyl) and R^{P} is hydrogen. In another embodiment of Formulae (X-r) through (X-w), R¹ is C₁₋₆alkyl (e.g., methyl or t-butyl) and a nitrogen protecting group.

[1101] In some embodiments, two adjacent nucleosides in the oligonucleotide have one of the formula

[chemical structure]

wherein Y is O or S (or O; or S); [symbol] represents the remainder for the oligonucleotide, and B is an optionally modified nucleobase. Therein, each nucleoside of the two adjacent nucleosides is independently according to any one of Formula (X-f) through (X-q). In certain embodiments, each nucleoside is according to the same Formula.

[1102] In some embodiments, three adjacent nucleosides in the oligonucleotide have the formula

[chemical structure]

wherein each Y is independently O or S (or O; or S; or O then S or S then 0, 5′ followed by 3′); [symbol] represents the remainder for the oligonucleotide, and B is an optionally modified nucleobase; e.g., each Y is O. Therein, each nucleoside of the three adjacent nucleosides is independently according to any one of Formula (X-f) through (X-q). In certain embodiments, each nucleoside is according to the same Formula.

[1103] In some embodiments, four adjacent nucleosides in the oligonucleotide have the formula,

[chemical structure]

wherein each Y is independently O or S; [symbol] represents the remainder for the oligonucleotide, and B is an optionally modified nucleobase; e.g., each Y is O. Therein, each nucleoside of the four adjacent nucleosides is independently according to any one of Formula (X-f) through (X-q). In certain embodiments, each nucleoside is according to the same Formula. In certain embodiments, each nucleoside is according to the same Formula (X-u) or (X-w).

[1104] In certain embodiments, where R^{T} is R^{T1}, wherein R^{T1} is -L^{L}-oligonucleotide, and when L^{L} connects to an oxygen atom or nitrogen atom in an internucleotide linkage, the internucleotide linkage can be of the formula, including the 3′ and 5′ oxygen atoms of the preceding and following nucleosides, respectively,

[chemical structure]

wherein L′ can be, for example a bond, —S(O)₂— or, in for Formula (X-pc), a 5-8 membered heterocyclyl ring optionally substituted with 1 or 2 R groups, as defined herein; and * represent the bond to ZZ.

[1105] For example, the preceding includes,

[chemical structure]

wherein * represent the bond to ZZ; and R^{N5} is hydrogen or C₁₋₁₀ alkyl.

[1106] For example, the preceding includes,

[chemical structure]

wherein * represent the bond to ZZ; m is an integer selected from 1-20 (e.g., 1-10, or 2-20, or 2-10, or 4-10, or 4-8; or 6-12; or 5; or 6; or 7; or 8; or 9; or 10), and R^{N5} is hydrogen or C₁₋₁₀ alkyl.

[1107] In another embodiment, the compound of Formula (X-pd) is

[chemical structure]

wherein Y′ is O or S, and R^{Y}, Y, R¹, L, L′, and ZZ are as defined for Formula (X). In one embodiment, R¹ is hydrogen. In another embodiment, R¹ is C₁₋₆alkyl (e.g., methyl or t-butyl).

[1108] In another embodiment, the compound is

[chemical structure]

[chemical structure]

wherein Y′ is O or S, and R¹, L, L′, and ZZ are as defined for Formula (X).

[1109] In another embodiment, the compound is

[chemical structure]

[chemical structure]

wherein each m is an integer selected from 1-20 (e.g., 2-20, 2-10, 1-10, 2-16, 4-16, 4-8, or 6-12), Y′ is O or S, and R¹, L, L′, and ZZ are as defined for Formula (X).

[1110] In another embodiment, the compound of Formula (X-pe) is

[chemical structure]

[1111] wherein Y′ is O or S, and R^{Y}, Y, R¹, L, L′, and ZZ are as defined for Formula (X). In one embodiment, Y′ is O. In another embodiment, Y′ is S.

[1112] In one embodiment, R¹ is hydrogen. In another embodiment, R¹ is C₁₋₆alkyl (e.g., methyl or t-butyl).

[1113] In one embodiment, R^{P} is hydrogen. In another embodiment, R^{P} is a nitrogen protecting group (e.g., t-butoxycarbonyl (Boc), benzyloxycarbonyl (Cbz) or phenoxyacetyl (pac)).

[1114] In one embodiment, Y′ is O and R¹ is hydrogen. In one embodiment, Y′ is O and R¹ is C₁₋₆ alkyl (e.g., methyl or t-butyl). In one embodiment, Y′ is S and R¹ is hydrogen. In one embodiment, Y′ is S and R¹ is C₁₋₆alkyl (e.g., methyl ort-butyl).

[1115] In one embodiment, Y′ is O and R^{P} is hydrogen. In one embodiment, Y′ is O and R^{P} is a nitrogen protecting group (e.g., t-butoxycarbonyl (Boc), benzyloxycarbonyl (Cbz) or phenoxyacetyl (pac)). In one embodiment, Y′ is S and R^{P} is hydrogen. In one embodiment, Y′ is S and R^{P} is a nitrogen protecting group (e.g., t-butoxycarbonyl (Boc), benzyloxycarbonyl (Cbz) or phenoxyacetyl (pac)).

[1116] In one embodiment, Y′ is O, R¹ is hydrogen and R^{P} is hydrogen. In one embodiment, Y′ is S, R¹ is hydrogen and R^{P} is hydrogen. In one embodiment, Y′ is O, R¹ is hydrogen and R^{P} is a nitrogen protecting group (e.g., t-butoxycarbonyl (Boc), benzyloxycarbonyl (Cbz) or phenoxyacetyl (pac)). In one embodiment, Y′ is S, R¹ is hydrogen and R^{P} is a nitrogen protecting group (e.g., t-butoxycarbonyl (Boc), benzyloxycarbonyl (Cbz) or phenoxyacetyl (pac)). In one embodiment, Y′ is O, R¹ is C₁₋₆alkyl (e.g., methyl or t-butyl) and R^{P} is hydrogen. In one embodiment, Y′ is S, R¹ is C₁₋₆alkyl (e.g., methyl or t-butyl) and R^{P} is hydrogen. In one embodiment, Y′ is O, R¹ is C₁₋₆alkyl (e.g., methyl or t-butyl) and R^{P} is a nitrogen protecting group (e.g., t-butoxycarbonyl (Boc), benzyloxycarbonyl (Cbz) or phenoxyacetyl (pac)). In one embodiment, Y′ is S, R¹ is C₁₋₆alkyl (e.g., methyl or t-butyl) and R^{P} is a nitrogen protecting group (e.g., t-butoxycarbonyl (Boc), benzyloxycarbonyl (Cbz) or phenoxyacetyl (pac)).

[1117] In another embodiment, the compound is

[chemical structure]

[chemical structure]

[1118] wherein Y′ is O or S, and R¹, L, L′, and ZZ are as defined for Formula (X). In one embodiment, Y′ is O. In another embodiment, Y′ is S.

[1119] In one embodiment, R¹ is hydrogen. In another embodiment, R¹ is C₁₋₆alkyl (e.g., methyl or t-butyl).

[1120] In one embodiment, R^{P} is hydrogen. In another embodiment, R^{P} is a nitrogen protecting group (e.g., t-butoxycarbonyl (Boc), benzyloxycarbonyl (Cbz) or phenoxyacetyl (pac)).

[1121] In one embodiment, Y′ is O and R¹ is hydrogen. In one embodiment, Y′ is O and R¹ is C₁₋₆ alkyl (e.g., methyl or t-butyl). In one embodiment, Y′ is S and R¹ is hydrogen. In one embodiment, Y′ is S and R¹ is C₁₋₆alkyl (e.g., methyl ort-butyl).

[1122] In one embodiment, Y′ is O and R^{P} is hydrogen. In one embodiment, Y′ is O and R^{P} is a nitrogen protecting group (e.g., t-butoxycarbonyl (Boc), benzyloxycarbonyl (Cbz) or phenoxyacetyl (pac)). In one embodiment, Y′ is S and R^{P} is hydrogen. In one embodiment, Y′ is S and R^{P} is a nitrogen protecting group (e.g., t-butoxycarbonyl (Boc), benzyloxycarbonyl (Cbz) or phenoxyacetyl (pac)).

[1123] In one embodiment, Y′ is O, R¹ is hydrogen and R^{P} is hydrogen. In one embodiment, Y′ is S, R¹ is hydrogen and R^{P} is hydrogen. In one embodiment, Y′ is O, R¹ is hydrogen and R^{P} is a nitrogen protecting group (e.g., t-butoxycarbonyl (Boc), benzyloxycarbonyl (Cbz) or phenoxyacetyl (pac)). In one embodiment, Y′ is S, R¹ is hydrogen and R^{P} is a nitrogen protecting group (e.g., t-butoxycarbonyl (Boc), benzyloxycarbonyl (Cbz) or phenoxyacetyl (pac)). In one embodiment, Y′ is O, R¹ is C₁₋₆alkyl (e.g., methyl or t-butyl) and R^{P} is hydrogen. In one embodiment, Y′ is S, R¹ is C₁₋₆alkyl (e.g., methyl or t-butyl) and R^{P} is hydrogen. In one embodiment, Y′ is O, R¹ is C₁₋₆alkyl (e.g., methyl or t-butyl) and R^{P} is a nitrogen protecting group (e.g., t-butoxycarbonyl (Boc), benzyloxycarbonyl (Cbz) or phenoxyacetyl (pac)). In one embodiment, Y′ is S, R¹ is C₁₋₆alkyl (e.g., methyl or t-butyl) and R^{P} is a nitrogen protecting group (e.g., t-butoxycarbonyl (Boc), benzyloxycarbonyl (Cbz) or phenoxyacetyl (pac)).

[1124] In another embodiment, the compound is

[chemical structure]

[chemical structure]

wherein each m is an integer selected from 1-20 (e.g., 2-20, 2-10, 1-10, 2-16, 4-16, 4-8, or 6-12), Y′ is O or S, and R¹, L, L′, and ZZ are as defined for Formula (X).

[1125] In one embodiment, Y′ is O. In another embodiment, Y′ is S.

[1126] In one embodiment, R¹ is hydrogen. In another embodiment, R¹ is C₁₋₆alkyl (e.g., methyl or t-butyl).

[1127] In one embodiment, R^{P} is hydrogen. In another embodiment, R^{P} is a nitrogen protecting group (e.g., t-butoxycarbonyl (Boc), benzyloxycarbonyl (Cbz) or phenoxyacetyl (pac)).

[1128] In one embodiment, Y′ is O and R¹ is hydrogen. In one embodiment, Y′ is O and R¹ is C₁₋₆ alkyl (e.g., methyl or t-butyl). In one embodiment, Y′ is S and R¹ is hydrogen. In one embodiment, Y′ is S and R¹ is C₁₋₆alkyl (e.g., methyl ort-butyl).

[1129] In one embodiment, Y′ is O and R^{P} is hydrogen. In one embodiment, Y′ is O and R^{P} is a nitrogen protecting group (e.g., t-butoxycarbonyl (Boc), benzyloxycarbonyl (Cbz) or phenoxyacetyl (pac)). In one embodiment, Y′ is S and R^{P} is hydrogen. In one embodiment, Y′ is S and R^{P} is a nitrogen protecting group (e.g., t-butoxycarbonyl (Boc), benzyloxycarbonyl (Cbz) or phenoxyacetyl (pac)).

[1130] In one embodiment, Y′ is O, R¹ is hydrogen and R^{P} is hydrogen. In one embodiment, Y′ is S, R¹ is hydrogen and R^{P} is hydrogen. In one embodiment, Y′ is O, R¹ is hydrogen and R^{P} is a nitrogen protecting group (e.g., t-butoxycarbonyl (Boc), benzyloxycarbonyl (Cbz) or phenoxyacetyl (pac)). In one embodiment, Y′ is S, R¹ is hydrogen and R^{P} is a nitrogen protecting group (e.g., t-butoxycarbonyl (Boc), benzyloxycarbonyl (Cbz) or phenoxyacetyl (pac)). In one embodiment, Y′ is O, R¹ is C₁₋₆alkyl (e.g., methyl or t-butyl) and R^{P} is hydrogen. In one embodiment, Y′ is S, R¹ is C₁₋₆alkyl (e.g., methyl or t-butyl) and R^{P} is hydrogen. In one embodiment, Y′ is O, R¹ is C₁₋₆alkyl (e.g., methyl or t-butyl) and R^{P} is a nitrogen protecting group (e.g., t-butoxycarbonyl (Boc), benzyloxycarbonyl (Cbz) or phenoxyacetyl (pac)). In one embodiment, Y′ is S, R¹ is C₁₋₆alkyl (e.g., methyl or t-butyl) and R^{P} is a nitrogen protecting group (e.g., t-butoxycarbonyl (Boc), benzyloxycarbonyl (Cbz) or phenoxyacetyl (pac)).

[1131] For Formula (X), when R^{T1} is -L^{L}-oligonucleotide and is conjugated at the 5′-end of the oligonucleotide, in one embodiment, R^{T1} can be represented as Formula (X-5′)

[chemical structure]

wherein L^{L} is —P(Y)(OH)—, wherein Y is O or S (e.g., S); and * represents the bond to remainder of the compound of Formula (X).

[1132] In another embodiment of Formula (X), when R^{T1} is -L^{L}-oligonucleotide and is conjugated at the 5′-end of the oligonucleotide, in one embodiment, R^{T1} can be represented as Formula (X-5′o) or Formula (X-5's),

[chemical structure]

wherein * represents the bond to remainder of the compound of Formula (X).

[1133] In an embodiment of Formula (X-5′), (X-5′o), and Formula (X-5's), -L-ZZ-L′-R^{T} represents any one of Formulae (x-a) through (x-s). In representative embodiments, -L-ZZ-L′-R^{T} represents Formula (x-1),

[chemical structure]

[1134] In other embodiments-L-ZZ-L′-R^{T} represents one of the following formulae:

[chemical structure]

[1135] In other embodiments of Formula (X-5′), (X-5′o), and Formula (X-5's), L-ZZ-L′-R^{T} represents,

[chemical structure]

[1136] In other embodiments of Formula (X-5′), (X-5′o), and Formula (X-5's), L-ZZ-L′-R^{T} represents,

[chemical structure]

[1137] In another embodiment, the compound of Formula (X) is

[chemical structure]

wherein Y′ is O or S, and R^{Y}, Y, R¹, L, L′, and ZZ are as defined for formula (X) or any embodiment thereof.

[1138] For Formula (X), when R^{T1} is -L^{L}-oligonucleotide and is conjugated at the 3′-end of the oligonucleotide, in one embodiment, R^{T1} can be represented as Formula (X-3′)

[chemical structure]

wherein L^{L} is —P(Y)(OH)—, wherein Y is O or S (e.g., S); and * represents the bond to remainder of the compound of Formula (X).

[1139] In another embodiment of Formula (X), when R^{T1} is -L^{L}-oligonucleotide and is conjugated at the 3′-end of the oligonucleotide, in one embodiment, R^{T1} can be represented as Formula (X-3′o) or Formula (X-3's),

[chemical structure]

wherein * represents the bond to remainder of the compound of Formula (X).

[1140] In an embodiment of Formula (X-3′), (X-3′o), and Formula (X-3's), -L-ZZ-L′-R^{T} represents any one of Formulae (x-a) through (x-ab).

[1141] In representative embodiments, -L-ZZ-L′-R^{T} represents Formula (x-e),

[chemical structure]

[1142] In other embodiments-L-ZZ-L′-R^{T} represents one of the following formulae:

[chemical structure]

[chemical structure]

[1143] In other embodiments of Formula (X-3′), (X-3′o), and Formula (X-3's), L-ZZ-L′-R^{T} represents,

[chemical structure]

[1144] In other embodiments of Formula (X-3′), (X-3′o), and Formula (X-3's), L-ZZ-L′-R^{T} represents,

[chemical structure]

[1145] In other embodiments of Formula (X-3′), (X-3′o), and Formula (X-3's), L-ZZ-L′-R^{T} represents,

[chemical structure]

[1146] In other embodiments of Formula (X-3′), (X-3′o), and Formula (X-3's), L-ZZ-L′-R^{T} represents,

[chemical structure]

[1147] In other embodiments of Formula (X-3′), (X-3′o), and Formula (X-3's), L-ZZ-L′-R^{T} represents,

[chemical structure]

[1148] In another embodiment of Formula (X), R^{L} is

[chemical structure]

[1149] In another embodiment, the compound of Formula (X) is

[chemical structure]

wherein Y′ is O or S, and R^{Y}, R¹, Y, L′, ZZ, and L are as defined for Formula (X) or any embodiment thereof. In one embodiment, R¹ is hydrogen. In another embodiment, R¹ is C₁₋₆alkyl (e.g., methyl or t-butyl).

[1150] In another embodiment, the compound of Formula (X) is

[chemical structure]

wherein Y′ is O or S, and R^{Y}, Y, R¹, L′, ZZ, and L are as defined for Formula (X) or any embodiment thereof

[1151] In another embodiment, the compound of Formula (X) is

[chemical structure]

wherein Y′ is O or S, and R^{Y}, R¹, Y, L′, ZZ, and L are as defined for Formula (X) or any embodiment thereof.

[1152] In one embodiment, Y′ is O. In another embodiment, Y′ is S.

[1153] In one embodiment, R¹ is hydrogen. In another embodiment, R¹ is C₁₋₆alkyl (e.g., methyl or t-butyl).

[1154] In one embodiment, R^{P} is hydrogen. In another embodiment, R^{P} is a nitrogen protecting group (e.g., t-butoxycarbonyl (Boc), benzyloxycarbonyl (Cbz) or phenoxyacetyl (pac)).

[1155] In one embodiment, Y′ is O and R¹ is hydrogen. In one embodiment, Y′ is O and R¹ is C₁₋₆ alkyl (e.g., methyl or t-butyl). In one embodiment, Y′ is S and R¹ is hydrogen. In one embodiment, Y′ is S and R¹ is C₁₋₆alkyl (e.g., methyl ort-butyl).

[1156] In one embodiment, Y′ is O and R^{P} is hydrogen. In one embodiment, Y′ is O and R^{P} is a nitrogen protecting group (e.g., t-butoxycarbonyl (Boc), benzyloxycarbonyl (Cbz) or phenoxyacetyl (pac)). In one embodiment, Y′ is S and R^{P} is hydrogen. In one embodiment, Y′ is S and R^{P} is a nitrogen protecting group (e.g., t-butoxycarbonyl (Boc), benzyloxycarbonyl (Cbz) or phenoxyacetyl (pac)).

[1157] In one embodiment, Y′ is O, R¹ is hydrogen and R^{P} is hydrogen. In one embodiment, Y′ is S, R¹ is hydrogen and R^{P} is hydrogen. In one embodiment, Y′ is O, R¹ is hydrogen and R^{P} is a nitrogen protecting group (e.g., t-butoxycarbonyl (Boc), benzyloxycarbonyl (Cbz) or phenoxyacetyl (pac)). In one embodiment, Y′ is S, R¹ is hydrogen and R^{P} is a nitrogen protecting group (e.g., t-butoxycarbonyl (Boc), benzyloxycarbonyl (Cbz) or phenoxyacetyl (pac)). In one embodiment, Y′ is O, R¹ is C₁₋₆alkyl (e.g., methyl or t-butyl) and R^{P} is hydrogen. In one embodiment, Y′ is S, R¹ is C₁₋₆alkyl (e.g., methyl or t-butyl) and R^{P} is hydrogen. In one embodiment, Y′ is O, R¹ is C₁₋₆alkyl (e.g., methyl or t-butyl) and R^{P} is a nitrogen protecting group (e.g., t-butoxycarbonyl (Boc), benzyloxycarbonyl (Cbz) or phenoxyacetyl (pac)). In one embodiment, Y′ is S, R¹ is C₁₋₆alkyl (e.g., methyl or t-butyl) and R^{P} is a nitrogen protecting group (e.g., t-butoxycarbonyl (Boc), benzyloxycarbonyl (Cbz) or phenoxyacetyl (pac)).

[1158] In another embodiment, the compound of Formula (X) is

[chemical structure]

wherein Y′ is O or S, and R^{P}, R¹, L′, ZZ, and L are as defined for Formula (X) or any embodiment thereof.

[1159] In one embodiment, Y′ is O. In another embodiment, Y′ is S.

[1160] In one embodiment, R¹ is hydrogen. In another embodiment, R¹ is C₁₋₆alkyl (e.g., methyl or t-butyl).

[1161] In one embodiment, R^{P} is hydrogen. In another embodiment, R^{P} is a nitrogen protecting group (e.g., t-butoxycarbonyl (Boc), benzyloxycarbonyl (Cbz) or phenoxyacetyl (pac)).

[1162] In one embodiment, Y′ is O and R¹ is hydrogen. In one embodiment, Y′ is O and R¹ is C₁₋₆ alkyl (e.g., methyl or t-butyl). In one embodiment, Y′ is S and R¹ is hydrogen. In one embodiment, Y′ is S and R¹ is C₁₋₆alkyl (e.g., methyl ort-butyl).

[1163] In one embodiment, Y′ is O and R^{P} is hydrogen. In one embodiment, Y′ is O and R^{P} is a nitrogen protecting group (e.g., t-butoxycarbonyl (Boc), benzyloxycarbonyl (Cbz) or phenoxyacetyl (pac)). In one embodiment, Y′ is S and R^{P} is hydrogen. In one embodiment, Y′ is S and R^{P} is a nitrogen protecting group (e.g., t-butoxycarbonyl (Boc), benzyloxycarbonyl (Cbz) or phenoxyacetyl (pac)).

[1164] In one embodiment, Y′ is O, R¹ is hydrogen and R^{P} is hydrogen. In one embodiment, Y′ is S, R¹ is hydrogen and R^{P} is hydrogen. In one embodiment, Y′ is O, R¹ is hydrogen and R^{P} is a nitrogen protecting group (e.g., t-butoxycarbonyl (Boc), benzyloxycarbonyl (Cbz) or phenoxyacetyl (pac)). In one embodiment, Y′ is S, R¹ is hydrogen and R^{P} is a nitrogen protecting group (e.g., t-butoxycarbonyl (Boc), benzyloxycarbonyl (Cbz) or phenoxyacetyl (pac)). In one embodiment, Y′ is O, R¹ is C₁₋₆alkyl (e.g., methyl or t-butyl) and R^{P} is hydrogen. In one embodiment, Y′ is S, R¹ is C₁₋₆alkyl (e.g., methyl or t-butyl) and R^{P} is hydrogen. In one embodiment, Y′ is O, R¹ is C₁₋₆alkyl (e.g., methyl or t-butyl) and R^{P} is a nitrogen protecting group (e.g., t-butoxycarbonyl (Boc), benzyloxycarbonyl (Cbz) or phenoxyacetyl (pac)). In one embodiment, Y′ is S, R¹ is C₁₋₆alkyl (e.g., methyl or t-butyl) and R^{P} is a nitrogen protecting group (e.g., t-butoxycarbonyl (Boc), benzyloxycarbonyl (Cbz) or phenoxyacetyl (pac)).

[1165] In another embodiment, the compound of Formula (X) is

[chemical structure]

wherein Y′ is O or S, and R^{P}, R¹, L′, and L are as defined for Formula (X) or any embodiment thereof.

[1166] In one embodiment, Y′ is O. In another embodiment, Y′ is S.

[1167] In one embodiment, R¹ is hydrogen. In another embodiment, R¹ is C₁₋₆alkyl (e.g., methyl or t-butyl).

[1168] In one embodiment, R^{P} is hydrogen. In another embodiment, R^{P} is a nitrogen protecting group (e.g., t-butoxycarbonyl (Boc), benzyloxycarbonyl (Cbz) or phenoxyacetyl (pac)).

[1169] In one embodiment, Y′ is O and R¹ is hydrogen. In one embodiment, Y′ is O and R¹ is C₁₋₆ alkyl (e.g., methyl or t-butyl). In one embodiment, Y′ is S and R¹ is hydrogen. In one embodiment, Y′ is S and R¹ is C₁₋₆alkyl (e.g., methyl ort-butyl).

[1170] In one embodiment, Y′ is O and R^{P} is hydrogen. In one embodiment, Y′ is O and R^{P} is a nitrogen protecting group (e.g., t-butoxycarbonyl (Boc), benzyloxycarbonyl (Cbz) or phenoxyacetyl (pac)). In one embodiment, Y′ is S and R^{P} is hydrogen. In one embodiment, Y′ is S and R^{P} is a nitrogen protecting group (e.g., t-butoxycarbonyl (Boc), benzyloxycarbonyl (Cbz) or phenoxyacetyl (pac)).

[1171] In one embodiment, Y′ is O, R¹ is hydrogen and R^{P} is hydrogen. In one embodiment, Y′ is S, R¹ is hydrogen and R^{P} is hydrogen. In one embodiment, Y′ is O, R¹ is hydrogen and R^{P} is a nitrogen protecting group (e.g., t-butoxycarbonyl (Boc), benzyloxycarbonyl (Cbz) or phenoxyacetyl (pac)). In one embodiment, Y′ is S, R¹ is hydrogen and R^{P} is a nitrogen protecting group (e.g., t-butoxycarbonyl (Boc), benzyloxycarbonyl (Cbz) or phenoxyacetyl (pac)). In one embodiment, Y′ is O, R¹ is C₁₋₆alkyl (e.g., methyl or t-butyl) and R^{P} is hydrogen. In one embodiment, Y′ is S, R¹ is C₁₋₆alkyl (e.g., methyl or t-butyl) and R^{P} is hydrogen. In one embodiment, Y′ is O, R¹ is C₁₋₆alkyl (e.g., methyl or t-butyl) and R^{P} is a nitrogen protecting group (e.g., t-butoxycarbonyl (Boc), benzyloxycarbonyl (Cbz) or phenoxyacetyl (pac)). In one embodiment, Y′ is S, R¹ is C₁₋₆alkyl (e.g., methyl or t-butyl) and R^{P} is a nitrogen protecting group (e.g., t-butoxycarbonyl (Boc), benzyloxycarbonyl (Cbz) or phenoxyacetyl (pac)).

[1172] In another embodiment, the compound of Formula (X) is

[chemical structure]

wherein each m is independently an integer selected from 1-10; Y′ is O or S, and R^{P} and R¹ are as defined for Formula (X) or any embodiment thereof. In one embodiment, each m is independently an integer selected from 2-10; or 2-8, or 2-6.

[1173] In one embodiment, Y′ is O. In another embodiment, Y′ is S.

[1174] In one embodiment, R¹ is hydrogen. In another embodiment, R¹ is C₁₋₆alkyl (e.g., methyl or t-butyl).

[1175] In one embodiment, R^{P} is hydrogen. In another embodiment, R^{P} is a nitrogen protecting group (e.g., t-butoxycarbonyl (Boc), benzyloxycarbonyl (Cbz) or phenoxyacetyl (pac)).

[1176] In one embodiment, Y′ is O and R¹ is hydrogen. In one embodiment, Y′ is O and R¹ is C₁₋₆ alkyl (e.g., methyl or t-butyl). In one embodiment, Y′ is S and R¹ is hydrogen. In one embodiment, Y′ is S and R¹ is C₁₋₆alkyl (e.g., methyl ort-butyl).

[1177] In one embodiment, Y′ is O and R^{P} is hydrogen. In one embodiment, Y′ is O and R^{P} is a nitrogen protecting group (e.g., t-butoxycarbonyl (Boc), benzyloxycarbonyl (Cbz) or phenoxyacetyl (pac)). In one embodiment, Y′ is S and R^{P} is hydrogen. In one embodiment, Y′ is S and R^{P} is a nitrogen protecting group (e.g., t-butoxycarbonyl (Boc), benzyloxycarbonyl (Cbz) or phenoxyacetyl (pac)).

[1178] In one embodiment, Y′ is O, R¹ is hydrogen and R^{P} is hydrogen. In one embodiment, Y′ is S, R¹ is hydrogen and R^{P} is hydrogen. In one embodiment, Y′ is O, R¹ is hydrogen and R^{P} is a nitrogen protecting group (e.g., t-butoxycarbonyl (Boc), benzyloxycarbonyl (Cbz) or phenoxyacetyl (pac)). In one embodiment, Y′ is S, R¹ is hydrogen and R^{P} is a nitrogen protecting group (e.g., t-butoxycarbonyl (Boc), benzyloxycarbonyl (Cbz) or phenoxyacetyl (pac)). In one embodiment, Y′ is O, R¹ is C₁₋₆alkyl (e.g., methyl or t-butyl) and R^{P} is hydrogen. In one embodiment, Y′ is S, R¹ is C₁₋₆alkyl (e.g., methyl or t-butyl) and R^{P} is hydrogen. In one embodiment, Y′ is O, R¹ is C₁₋₆alkyl (e.g., methyl or t-butyl) and R^{P} is a nitrogen protecting group (e.g., t-butoxycarbonyl (Boc), benzyloxycarbonyl (Cbz) or phenoxyacetyl (pac)). In one embodiment, Y′ is S, R¹ is C₁₋₆alkyl (e.g., methyl or t-butyl) and R^{P} is a nitrogen protecting group (e.g., t-butoxycarbonyl (Boc), benzyloxycarbonyl (Cbz) or phenoxyacetyl (pac)).

[1179] In another embodiment, the compound of Formula (X) is

[chemical structure]

wherein Y′ is O or S, and R^{P} and R¹ are as defined for Formula (X) or any embodiment thereof.

[1180] In one embodiment, Y′ is O. In another embodiment, Y′ is S.

[1181] In one embodiment, R¹ is hydrogen. In another embodiment, R¹ is C₁₋₆alkyl (e.g., methyl or t-butyl).

[1182] In one embodiment, R^{P} is hydrogen. In another embodiment, R^{P} is a nitrogen protecting group (e.g., t-butoxycarbonyl (Boc), benzyloxycarbonyl (Cbz) or phenoxyacetyl (pac)).

[1183] In one embodiment, Y′ is O and R¹ is hydrogen. In one embodiment, Y′ is O and R¹ is C₁₋₆ alkyl (e.g., methyl or t-butyl). In one embodiment, Y′ is S and R¹ is hydrogen. In one embodiment, Y′ is S and R¹ is C₁₋₆alkyl (e.g., methyl ort-butyl).

[1184] In one embodiment, Y′ is O and R^{P} is hydrogen. In one embodiment, Y′ is O and R^{P} is a nitrogen protecting group (e.g., t-butoxycarbonyl (Boc), benzyloxycarbonyl (Cbz) or phenoxyacetyl (pac)). In one embodiment, Y′ is S and R^{P} is hydrogen. In one embodiment, Y′ is S and R^{P} is a nitrogen protecting group (e.g., t-butoxycarbonyl (Boc), benzyloxycarbonyl (Cbz) or phenoxyacetyl (pac)).

[1185] In one embodiment, Y′ is O, R¹ is hydrogen and R^{P} is hydrogen. In one embodiment, Y′ is S, R¹ is hydrogen and R^{P} is hydrogen. In one embodiment, Y′ is O, R¹ is hydrogen and R^{P} is a nitrogen protecting group (e.g., t-butoxycarbonyl (Boc), benzyloxycarbonyl (Cbz) or phenoxyacetyl (pac)). In one embodiment, Y′ is S, R¹ is hydrogen and R^{P} is a nitrogen protecting group (e.g., t-butoxycarbonyl (Boc), benzyloxycarbonyl (Cbz) or phenoxyacetyl (pac)). In one embodiment, Y′ is O, R¹ is C₁₋₆alkyl (e.g., methyl or t-butyl) and R^{P} is hydrogen. In one embodiment, Y′ is S, R¹ is C₁₋₆alkyl (e.g., methyl or t-butyl) and R^{P} is hydrogen. In one embodiment, Y′ is O, R¹ is C₁₋₆alkyl (e.g., methyl or t-butyl) and R^{P} is a nitrogen protecting group (e.g., t-butoxycarbonyl (Boc), benzyloxycarbonyl (Cbz) or phenoxyacetyl (pac)). In one embodiment, Y′ is S, R¹ is C₁₋₆alkyl (e.g., methyl or t-butyl) and R^{P} is a nitrogen protecting group (e.g., t-butoxycarbonyl (Boc), benzyloxycarbonyl (Cbz) or phenoxyacetyl (pac)).

[1186] In another embodiment, the compound of Formula (X) is

[chemical structure]

wherein Y′ is O or S, and R^{P}, R¹, L′, ZZ, and L are as defined for Formula (X) or any embodiment thereof.

[1187] In one embodiment, Y′ is O. In another embodiment, Y′ is S.

[1188] In one embodiment, R¹ is hydrogen. In another embodiment, R¹ is C₁₋₆alkyl (e.g., methyl or t-butyl).

[1189] In one embodiment, R^{P} is hydrogen. In another embodiment, R^{P} is a nitrogen protecting group (e.g., t-butoxycarbonyl (Boc), benzyloxycarbonyl (Cbz) or phenoxyacetyl (pac)).

[1190] In one embodiment, Y′ is O and R¹ is hydrogen. In one embodiment, Y′ is O and R¹ is C₁₋₆ alkyl (e.g., methyl or t-butyl). In one embodiment, Y′ is S and R¹ is hydrogen. In one embodiment, Y′ is S and R¹ is C₁₋₆alkyl (e.g., methyl ort-butyl).

[1191] In one embodiment, Y′ is O and R^{P} is hydrogen. In one embodiment, Y′ is O and R^{P} is a nitrogen protecting group (e.g., t-butoxycarbonyl (Boc), benzyloxycarbonyl (Cbz) or phenoxyacetyl (pac)). In one embodiment, Y′ is S and R^{P} is hydrogen. In one embodiment, Y′ is S and R^{P} is a nitrogen protecting group (e.g., t-butoxycarbonyl (Boc), benzyloxycarbonyl (Cbz) or phenoxyacetyl (pac)).

[1192] In one embodiment, Y′ is O, R¹ is hydrogen and R^{P} is hydrogen. In one embodiment, Y′ is S, R¹ is hydrogen and R^{P} is hydrogen. In one embodiment, Y′ is O, R¹ is hydrogen and R^{P} is a nitrogen protecting group (e.g., t-butoxycarbonyl (Boc), benzyloxycarbonyl (Cbz) or phenoxyacetyl (pac)). In one embodiment, Y′ is S, R¹ is hydrogen and R^{P} is a nitrogen protecting group (e.g., t-butoxycarbonyl (Boc), benzyloxycarbonyl (Cbz) or phenoxyacetyl (pac)). In one embodiment, Y′ is O, R¹ is C₁₋₆alkyl (e.g., methyl or t-butyl) and R^{P} is hydrogen. In one embodiment, Y′ is S, R¹ is C₁₋₆alkyl (e.g., methyl or t-butyl) and R^{P} is hydrogen. In one embodiment, Y′ is O, R¹ is C₁₋₆alkyl (e.g., methyl or t-butyl) and R^{P} is a nitrogen protecting group (e.g., t-butoxycarbonyl (Boc), benzyloxycarbonyl (Cbz) or phenoxyacetyl (pac)). In one embodiment, Y′ is S, R¹ is C₁₋₆alkyl (e.g., methyl or t-butyl) and R^{P} is a nitrogen protecting group (e.g., t-butoxycarbonyl (Boc), benzyloxycarbonyl (Cbz) or phenoxyacetyl (pac)).

[1193] In another embodiment, the compound of Formula (X) is

[chemical structure]

wherein Y′ is O or S, and R^{P}, R¹, L′, and L are as defined for Formula (X) or any embodiment thereof.

[1194] In one embodiment, Y′ is O. In another embodiment, Y′ is S.

[1195] In one embodiment, R¹ is hydrogen. In another embodiment, R¹ is C₁₋₆alkyl (e.g., methyl or t-butyl).

[1196] In one embodiment, R^{P} is hydrogen. In another embodiment, R^{P} is a nitrogen protecting group (e.g., t-butoxycarbonyl (Boc), benzyloxycarbonyl (Cbz) or phenoxyacetyl (pac)).

[1197] In one embodiment, Y′ is O and R¹ is hydrogen. In one embodiment, Y′ is O and R¹ is C₁₋₆ alkyl (e.g., methyl or t-butyl). In one embodiment, Y′ is S and R¹ is hydrogen. In one embodiment, Y′ is S and R¹ is C₁₋₆alkyl (e.g., methyl ort-butyl).

[1198] In one embodiment, Y′ is O and R^{P} is hydrogen. In one embodiment, Y′ is O and R^{P} is a nitrogen protecting group (e.g., t-butoxycarbonyl (Boc), benzyloxycarbonyl (Cbz) or phenoxyacetyl (pac)). In one embodiment, Y′ is S and R^{P} is hydrogen. In one embodiment, Y′ is S and R^{P} is a nitrogen protecting group (e.g., t-butoxycarbonyl (Boc), benzyloxycarbonyl (Cbz) or phenoxyacetyl (pac)).

[1199] In one embodiment, Y′ is O, R¹ is hydrogen and R^{P} is hydrogen. In one embodiment, Y′ is S, R¹ is hydrogen and R^{P} is hydrogen. In one embodiment, Y′ is O, R¹ is hydrogen and R^{P} is a nitrogen protecting group (e.g., t-butoxycarbonyl (Boc), benzyloxycarbonyl (Cbz) or phenoxyacetyl (pac)). In one embodiment, Y′ is S, R¹ is hydrogen and R^{P} is a nitrogen protecting group (e.g., t-butoxycarbonyl (Boc), benzyloxycarbonyl (Cbz) or phenoxyacetyl (pac)). In one embodiment, Y′ is O, R¹ is C₁₋₆alkyl (e.g., methyl or t-butyl) and R^{P} is hydrogen. In one embodiment, Y′ is S, R¹ is C₁₋₆alkyl (e.g., methyl or t-butyl) and R^{P} is hydrogen. In one embodiment, Y′ is O, R¹ is C₁₋₆alkyl (e.g., methyl or t-butyl) and R^{P} is a nitrogen protecting group (e.g., t-butoxycarbonyl (Boc), benzyloxycarbonyl (Cbz) or phenoxyacetyl (pac)). In one embodiment, Y′ is S, R¹ is C₁₋₆alkyl (e.g., methyl or t-butyl) and R^{P} is a nitrogen protecting group (e.g., t-butoxycarbonyl (Boc), benzyloxycarbonyl (Cbz) or phenoxyacetyl (pac)).

[1200] In another embodiment, the compound of Formula (X) is

[chemical structure]

wherein each m is independently an integer selected from 1-10; Y′ is O or S, and R^{P} and R¹ are as defined for Formula (X) or any embodiment thereof. In one embodiment, each m is independently an integer selected from 2-10; or 2-8, or 2-6.

[1201] In one embodiment, Y′ is O. In another embodiment, Y′ is S.

[1202] In one embodiment, R¹ is hydrogen. In another embodiment, R¹ is C₁₋₆alkyl (e.g., methyl or t-butyl).

[1203] In one embodiment, R^{P} is hydrogen. In another embodiment, R^{P} is a nitrogen protecting group (e.g., t-butoxycarbonyl (Boc), benzyloxycarbonyl (Cbz) or phenoxyacetyl (pac)).

[1204] In one embodiment, Y′ is O and R¹ is hydrogen. In one embodiment, Y′ is O and R¹ is C₁₋₆ alkyl (e.g., methyl or t-butyl). In one embodiment, Y′ is S and R¹ is hydrogen. In one embodiment, Y′ is S and R¹ is C₁₋₆alkyl (e.g., methyl ort-butyl).

[1205] In one embodiment, Y′ is O and R^{P} is hydrogen. In one embodiment, Y′ is O and R^{P} is a nitrogen protecting group (e.g., t-butoxycarbonyl (Boc), benzyloxycarbonyl (Cbz) or phenoxyacetyl (pac)). In one embodiment, Y′ is S and R^{P} is hydrogen. In one embodiment, Y′ is S and R^{P} is a nitrogen protecting group (e.g., t-butoxycarbonyl (Boc), benzyloxycarbonyl (Cbz) or phenoxyacetyl (pac)).

[1206] In one embodiment, Y′ is O, R¹ is hydrogen and R^{P} is hydrogen. In one embodiment, Y′ is S, R¹ is hydrogen and R^{P} is hydrogen. In one embodiment, Y′ is O, R¹ is hydrogen and R^{P} is a nitrogen protecting group (e.g., t-butoxycarbonyl (Boc), benzyloxycarbonyl (Cbz) or phenoxyacetyl (pac)). In one embodiment, Y′ is S, R¹ is hydrogen and R^{P} is a nitrogen protecting group (e.g., t-butoxycarbonyl (Boc), benzyloxycarbonyl (Cbz) or phenoxyacetyl (pac)). In one embodiment, Y′ is O, R¹ is C₁₋₆alkyl (e.g., methyl or t-butyl) and R^{P} is hydrogen. In one embodiment, Y′ is S, R¹ is C₁₋₆alkyl (e.g., methyl or t-butyl) and R^{P} is hydrogen. In one embodiment, Y′ is O, R¹ is C₁₋₆alkyl (e.g., methyl or t-butyl) and R^{P} is a nitrogen protecting group (e.g., t-butoxycarbonyl (Boc), benzyloxycarbonyl (Cbz) or phenoxyacetyl (pac)). In one embodiment, Y′ is S, R¹ is C₁₋₆alkyl (e.g., methyl or t-butyl) and R^{P} is a nitrogen protecting group (e.g., t-butoxycarbonyl (Boc), benzyloxycarbonyl (Cbz) or phenoxyacetyl (pac)).

[1207] In another embodiment, the compound of Formula (X) is

[chemical structure]

wherein Y′ is O or S, and R^{P} and R¹ are as defined for Formula (X) or any embodiment thereof.

[1208] In one embodiment, Y′ is O. In another embodiment, Y′ is S.

[1209] In one embodiment, R¹ is hydrogen. In another embodiment, R¹ is C₁₋₆alkyl (e.g., methyl or t-butyl).

[1210] In one embodiment, R^{P} is hydrogen. In another embodiment, R^{P} is a nitrogen protecting group (e.g., t-butoxycarbonyl (Boc), benzyloxycarbonyl (Cbz) or phenoxyacetyl (pac)).

[1211] In one embodiment, Y′ is O and R¹ is hydrogen. In one embodiment, Y′ is O and R¹ is C₁₋₆ alkyl (e.g., methyl or t-butyl). In one embodiment, Y′ is S and R¹ is hydrogen. In one embodiment, Y′ is S and R¹ is C₁₋₆alkyl (e.g., methyl ort-butyl).

[1212] In one embodiment, Y′ is O and R^{P} is hydrogen. In one embodiment, Y′ is O and R^{P} is a nitrogen protecting group (e.g., t-butoxycarbonyl (Boc), benzyloxycarbonyl (Cbz) or phenoxyacetyl (pac)). In one embodiment, Y′ is S and R^{P} is hydrogen. In one embodiment, Y′ is S and R^{P} is a nitrogen protecting group (e.g., t-butoxycarbonyl (Boc), benzyloxycarbonyl (Cbz) or phenoxyacetyl (pac)).

[1213] In one embodiment, Y′ is O, R¹ is hydrogen and R^{P} is hydrogen. In one embodiment, Y′ is S, R¹ is hydrogen and R^{P} is hydrogen. In one embodiment, Y′ is O, R¹ is hydrogen and R^{P} is a nitrogen protecting group (e.g., t-butoxycarbonyl (Boc), benzyloxycarbonyl (Cbz) or phenoxyacetyl (pac)). In one embodiment, Y′ is S, R¹ is hydrogen and R^{P} is a nitrogen protecting group (e.g., t-butoxycarbonyl (Boc), benzyloxycarbonyl (Cbz) or phenoxyacetyl (pac)). In one embodiment, Y′ is O, R¹ is C₁₋₆alkyl (e.g., methyl or t-butyl) and R^{P} is hydrogen. In one embodiment, Y′ is S, R¹ is C₁₋₆alkyl (e.g., methyl or t-butyl) and R^{P} is hydrogen. In one embodiment, Y′ is O, R¹ is C₁₋₆alkyl (e.g., methyl or t-butyl) and R^{P} is a nitrogen protecting group (e.g., t-butoxycarbonyl (Boc), benzyloxycarbonyl (Cbz) or phenoxyacetyl (pac)). In one embodiment, Y′ is S, R¹ is C₁₋₆alkyl (e.g., methyl or t-butyl) and R^{P} is a nitrogen protecting group (e.g., t-butoxycarbonyl (Boc), benzyloxycarbonyl (Cbz) or phenoxyacetyl (pac)).

[1214] In another embodiment, the compound of Formula (X) is

[chemical structure]

wherein Y′ is O or S, and R^{P}, R¹, L′, ZZ, and L are as defined for Formula (X) or any embodiment thereof.

[1215] In one embodiment, Y′ is O. In another embodiment, Y′ is S.

[1216] In one embodiment, R¹ is hydrogen. In another embodiment, R¹ is C₁₋₆alkyl (e.g., methyl or t-butyl).

[1217] In one embodiment, R^{P} is hydrogen. In another embodiment, R^{P} is a nitrogen protecting group (e.g., t-butoxycarbonyl (Boc), benzyloxycarbonyl (Cbz) or phenoxyacetyl (pac)).

[1218] In one embodiment, Y′ is O and R¹ is hydrogen. In one embodiment, Y′ is O and R¹ is C₁₋₆ alkyl (e.g., methyl or t-butyl). In one embodiment, Y′ is S and R¹ is hydrogen. In one embodiment, Y′ is S and R¹ is C₁₋₆alkyl (e.g., methyl ort-butyl).

[1219] In one embodiment, Y′ is O and R^{P} is hydrogen. In one embodiment, Y′ is O and R^{P} is a nitrogen protecting group (e.g., t-butoxycarbonyl (Boc), benzyloxycarbonyl (Cbz) or phenoxyacetyl (pac)). In one embodiment, Y′ is S and R^{P} is hydrogen. In one embodiment, Y′ is S and R^{P} is a nitrogen protecting group (e.g., t-butoxycarbonyl (Boc), benzyloxycarbonyl (Cbz) or phenoxyacetyl (pac)).

[1220] In one embodiment, Y′ is O, R¹ is hydrogen and R^{P} is hydrogen. In one embodiment, Y′ is S, R¹ is hydrogen and R^{P} is hydrogen. In one embodiment, Y′ is O, R¹ is hydrogen and R^{P} is a nitrogen protecting group (e.g., t-butoxycarbonyl (Boc), benzyloxycarbonyl (Cbz) or phenoxyacetyl (pac)). In one embodiment, Y′ is S, R¹ is hydrogen and R^{P} is a nitrogen protecting group (e.g., t-butoxycarbonyl (Boc), benzyloxycarbonyl (Cbz) or phenoxyacetyl (pac)). In one embodiment, Y′ is O, R¹ is C₁₋₆alkyl (e.g., methyl or t-butyl) and R^{P} is hydrogen. In one embodiment, Y′ is S, R¹ is C₁₋₆alkyl (e.g., methyl or t-butyl) and R^{P} is hydrogen. In one embodiment, Y′ is O, R¹ is C₁₋₆alkyl (e.g., methyl or t-butyl) and R^{P} is a nitrogen protecting group (e.g., t-butoxycarbonyl (Boc), benzyloxycarbonyl (Cbz) or phenoxyacetyl (pac)). In one embodiment, Y′ is S, R¹ is C₁₋₆alkyl (e.g., methyl or t-butyl) and R^{P} is a nitrogen protecting group (e.g., t-butoxycarbonyl (Boc), benzyloxycarbonyl (Cbz) or phenoxyacetyl (pac)).

[1221] In another embodiment, the compound of Formula (X) is

[chemical structure]

wherein Y′ is O or S, and R^{P}, R¹, L′, and L are as defined for Formula (X) or any embodiment thereof.

[1222] In one embodiment, Y′ is O. In another embodiment, Y′ is S.

[1223] In one embodiment, R¹ is hydrogen. In another embodiment, R¹ is C₁₋₆alkyl (e.g., methyl or t-butyl).

[1224] In one embodiment, R^{P} is hydrogen. In another embodiment, R^{P} is a nitrogen protecting group (e.g., t-butoxycarbonyl (Boc), benzyloxycarbonyl (Cbz) or phenoxyacetyl (pac)).

[1225] In one embodiment, Y′ is O and R¹ is hydrogen. In one embodiment, Y′ is O and R¹ is C₁₋₆ alkyl (e.g., methyl or t-butyl). In one embodiment, Y′ is S and R¹ is hydrogen. In one embodiment, Y′ is S and R¹ is C₁₋₆alkyl (e.g., methyl ort-butyl).

[1226] In one embodiment, Y′ is O and R^{P} is hydrogen. In one embodiment, Y′ is O and R^{P} is a nitrogen protecting group (e.g., t-butoxycarbonyl (Boc), benzyloxycarbonyl (Cbz) or phenoxyacetyl (pac)). In one embodiment, Y′ is S and R^{P} is hydrogen. In one embodiment, Y′ is S and R^{P} is a nitrogen protecting group (e.g., t-butoxycarbonyl (Boc), benzyloxycarbonyl (Cbz) or phenoxyacetyl (pac)).

[1227] In one embodiment, Y′ is O, R¹ is hydrogen and R^{P} is hydrogen. In one embodiment, Y′ is S, R¹ is hydrogen and R^{P} is hydrogen. In one embodiment, Y′ is O, R¹ is hydrogen and R^{P} is a nitrogen protecting group (e.g., t-butoxycarbonyl (Boc), benzyloxycarbonyl (Cbz) or phenoxyacetyl (pac)). In one embodiment, Y′ is S, R¹ is hydrogen and R^{P} is a nitrogen protecting group (e.g., t-butoxycarbonyl (Boc), benzyloxycarbonyl (Cbz) or phenoxyacetyl (pac)). In one embodiment, Y′ is O, R¹ is C₁₋₆alkyl (e.g., methyl or t-butyl) and R^{P} is hydrogen. In one embodiment, Y′ is S, R¹ is C₁₋₆alkyl (e.g., methyl or t-butyl) and R^{P} is hydrogen. In one embodiment, Y′ is O, R¹ is C₁₋₆alkyl (e.g., methyl or t-butyl) and R^{P} is a nitrogen protecting group (e.g., t-butoxycarbonyl (Boc), benzyloxycarbonyl (Cbz) or phenoxyacetyl (pac)). In one embodiment, Y′ is S, R¹ is C₁₋₆alkyl (e.g., methyl or t-butyl) and R^{P} is a nitrogen protecting group (e.g., t-butoxycarbonyl (Boc), benzyloxycarbonyl (Cbz) or phenoxyacetyl (pac)).

[1228] In another embodiment, the compound of Formula (X) is

[chemical structure]

wherein each m is independently an integer selected from 1-10; Y′ is O or S, and R^{P} and R¹, are as defined for Formula (X) or any embodiment thereof. In one embodiment, each m is independently an integer selected from 2-10; or 2-8, or 2-6.

[1229] In one embodiment, Y′ is O. In another embodiment, Y′ is S.

[1230] In one embodiment, R¹ is hydrogen. In another embodiment, R¹ is C₁₋₆alkyl (e.g., methyl or t-butyl).

[1231] In one embodiment, R^{P} is hydrogen. In another embodiment, R^{P} is a nitrogen protecting group (e.g., t-butoxycarbonyl (Boc), benzyloxycarbonyl (Cbz) or phenoxyacetyl (pac)).

[1232] In one embodiment, Y′ is O and R¹ is hydrogen. In one embodiment, Y′ is O and R¹ is C₁₋₆ alkyl (e.g., methyl or t-butyl). In one embodiment, Y′ is S and R¹ is hydrogen. In one embodiment, Y′ is S and R¹ is C₁₋₆alkyl (e.g., methyl ort-butyl).

[1233] In one embodiment, Y′ is O and R^{P} is hydrogen. In one embodiment, Y′ is O and R^{P} is a nitrogen protecting group (e.g., t-butoxycarbonyl (Boc), benzyloxycarbonyl (Cbz) or phenoxyacetyl (pac)). In one embodiment, Y′ is S and R^{P} is hydrogen. In one embodiment, Y′ is S and R^{P} is a nitrogen protecting group (e.g., t-butoxycarbonyl (Boc), benzyloxycarbonyl (Cbz) or phenoxyacetyl (pac)).

[1234] In one embodiment, Y′ is O, R¹ is hydrogen and R^{P} is hydrogen. In one embodiment, Y′ is S, R¹ is hydrogen and R^{P} is hydrogen. In one embodiment, Y′ is O, R¹ is hydrogen and R^{P} is a nitrogen protecting group (e.g., t-butoxycarbonyl (Boc), benzyloxycarbonyl (Cbz) or phenoxyacetyl (pac)). In one embodiment, Y′ is S, R¹ is hydrogen and R^{P} is a nitrogen protecting group (e.g., t-butoxycarbonyl (Boc), benzyloxycarbonyl (Cbz) or phenoxyacetyl (pac)). In one embodiment, Y′ is O, R¹ is C₁₋₆alkyl (e.g., methyl or t-butyl) and R^{P} is hydrogen. In one embodiment, Y′ is S, R¹ is C₁₋₆alkyl (e.g., methyl or t-butyl) and R^{P} is hydrogen. In one embodiment, Y′ is O, R¹ is C₁₋₆alkyl (e.g., methyl or t-butyl) and R^{P} is a nitrogen protecting group (e.g., t-butoxycarbonyl (Boc), benzyloxycarbonyl (Cbz) or phenoxyacetyl (pac)). In one embodiment, Y′ is S, R¹ is C₁₋₆alkyl (e.g., methyl or t-butyl) and R^{P} is a nitrogen protecting group (e.g., t-butoxycarbonyl (Boc), benzyloxycarbonyl (Cbz) or phenoxyacetyl (pac)).

[1235] In another embodiment, the compound of Formula (X) is

[chemical structure]

wherein Y′ is O or S, and R^{P} and R¹ are as defined for Formula (X) or any embodiment thereof.

[1236] In one embodiment, Y′ is O. In another embodiment, Y′ is S.

[1237] In one embodiment, R¹ is hydrogen. In another embodiment, R¹ is C₁₋₆alkyl (e.g., methyl or t-butyl).

[1238] In one embodiment, R^{P} is hydrogen. In another embodiment, R^{P} is a nitrogen protecting group (e.g., t-butoxycarbonyl (Boc), benzyloxycarbonyl (Cbz) or phenoxyacetyl (pac)).

[1239] In one embodiment, Y′ is O and R¹ is hydrogen. In one embodiment, Y′ is O and R¹ is C₁₋₆ alkyl (e.g., methyl or t-butyl). In one embodiment, Y′ is S and R¹ is hydrogen. In one embodiment, Y′ is S and R¹ is C₁₋₆alkyl (e.g., methyl ort-butyl).

[1240] In one embodiment, Y′ is O and R^{P} is hydrogen. In one embodiment, Y′ is O and R^{P} is a nitrogen protecting group (e.g., t-butoxycarbonyl (Boc), benzyloxycarbonyl (Cbz) or phenoxyacetyl (pac)). In one embodiment, Y′ is S and R^{P} is hydrogen. In one embodiment, Y′ is S and R^{P} is a nitrogen protecting group (e.g., t-butoxycarbonyl (Boc), benzyloxycarbonyl (Cbz) or phenoxyacetyl (pac)).

[1241] In one embodiment, Y′ is O, R¹ is hydrogen and R^{P} is hydrogen. In one embodiment, Y′ is S, R¹ is hydrogen and R^{P} is hydrogen. In one embodiment, Y′ is O, R¹ is hydrogen and R^{P} is a nitrogen protecting group (e.g., t-butoxycarbonyl (Boc), benzyloxycarbonyl (Cbz) or phenoxyacetyl (pac)). In one embodiment, Y′ is S, R¹ is hydrogen and R^{P} is a nitrogen protecting group (e.g., t-butoxycarbonyl (Boc), benzyloxycarbonyl (Cbz) or phenoxyacetyl (pac)). In one embodiment, Y′ is O, R¹ is C₁₋₆alkyl (e.g., methyl or t-butyl) and R^{P} is hydrogen. In one embodiment, Y′ is S, R¹ is C₁₋₆alkyl (e.g., methyl or t-butyl) and R^{P} is hydrogen. In one embodiment, Y′ is O, R¹ is C₁₋₆alkyl (e.g., methyl or t-butyl) and R^{P} is a nitrogen protecting group (e.g., t-butoxycarbonyl (Boc), benzyloxycarbonyl (Cbz) or phenoxyacetyl (pac)). In one embodiment, Y′ is S, R¹ is C₁₋₆alkyl (e.g., methyl or t-butyl) and R^{P} is a nitrogen protecting group (e.g., t-butoxycarbonyl (Boc), benzyloxycarbonyl (Cbz) or phenoxyacetyl (pac)).

[1242] In another embodiment, the compound of Formula (X) is

[chemical structure]

wherein Y′ is O or S, and R^{P}, R¹, L′, ZZ, and L are as defined for Formula (X) or any embodiment thereof.

[1243] In one embodiment, Y′ is O. In another embodiment, Y′ is S.

[1244] In one embodiment, R¹ is hydrogen. In another embodiment, R¹ is C₁₋₆alkyl (e.g., methyl or t-butyl).

[1245] In one embodiment, R^{P} is hydrogen. In another embodiment, R^{P} is a nitrogen protecting group (e.g., t-butoxycarbonyl (Boc), benzyloxycarbonyl (Cbz) or phenoxyacetyl (pac)).

[1246] In one embodiment, Y′ is O and R¹ is hydrogen. In one embodiment, Y′ is O and R¹ is C₁₋₆ alkyl (e.g., methyl or t-butyl). In one embodiment, Y′ is S and R¹ is hydrogen. In one embodiment, Y′ is S and R¹ is C₁₋₆alkyl (e.g., methyl ort-butyl).

[1247] In one embodiment, Y′ is O and R^{P} is hydrogen. In one embodiment, Y′ is O and R^{P} is a nitrogen protecting group (e.g., t-butoxycarbonyl (Boc), benzyloxycarbonyl (Cbz) or phenoxyacetyl (pac)). In one embodiment, Y′ is S and R^{P} is hydrogen. In one embodiment, Y′ is S and R^{P} is a nitrogen protecting group (e.g., t-butoxycarbonyl (Boc), benzyloxycarbonyl (Cbz) or phenoxyacetyl (pac)).

[1248] In one embodiment, Y′ is O, R¹ is hydrogen and R^{P} is hydrogen. In one embodiment, Y′ is S, R¹ is hydrogen and R^{P} is hydrogen. In one embodiment, Y′ is O, R¹ is hydrogen and R^{P} is a nitrogen protecting group (e.g., t-butoxycarbonyl (Boc), benzyloxycarbonyl (Cbz) or phenoxyacetyl (pac)). In one embodiment, Y′ is S, R¹ is hydrogen and R^{P} is a nitrogen protecting group (e.g., t-butoxycarbonyl (Boc), benzyloxycarbonyl (Cbz) or phenoxyacetyl (pac)). In one embodiment, Y′ is O, R¹ is C₁₋₆alkyl (e.g., methyl or t-butyl) and R^{P} is hydrogen. In one embodiment, Y′ is S, R¹ is C₁₋₆alkyl (e.g., methyl or t-butyl) and R^{P} is hydrogen. In one embodiment, Y′ is O, R¹ is C₁₋₆alkyl (e.g., methyl or t-butyl) and R^{P} is a nitrogen protecting group (e.g., t-butoxycarbonyl (Boc), benzyloxycarbonyl (Cbz) or phenoxyacetyl (pac)). In one embodiment, Y′ is S, R¹ is C₁₋₆alkyl (e.g., methyl or t-butyl) and R^{P} is a nitrogen protecting group (e.g., t-butoxycarbonyl (Boc), benzyloxycarbonyl (Cbz) or phenoxyacetyl (pac)).

[1249] In another embodiment, the compound of Formula (X) is

[chemical structure]

wherein Y′ is O or S, and R^{P}, R¹, L′, and L are as defined for Formula (X) or any embodiment thereof.

[1250] In one embodiment, Y′ is O. In another embodiment, Y′ is S.

[1251] In one embodiment, R¹ is hydrogen. In another embodiment, R¹ is C₁₋₆alkyl (e.g., methyl or t-butyl).

[1252] In one embodiment, R^{P} is hydrogen. In another embodiment, R^{P} is a nitrogen protecting group (e.g., t-butoxycarbonyl (Boc), benzyloxycarbonyl (Cbz) or phenoxyacetyl (pac)).

[1253] In one embodiment, Y′ is O and R¹ is hydrogen. In one embodiment, Y′ is O and R¹ is C₁₋₆ alkyl (e.g., methyl or t-butyl). In one embodiment, Y′ is S and R¹ is hydrogen. In one embodiment, Y′ is S and R¹ is C₁₋₆alkyl (e.g., methyl ort-butyl).

[1254] In one embodiment, Y′ is O and R^{P} is hydrogen. In one embodiment, Y′ is O and R^{P} is a nitrogen protecting group (e.g., t-butoxycarbonyl (Boc), benzyloxycarbonyl (Cbz) or phenoxyacetyl (pac)). In one embodiment, Y′ is S and R^{P} is hydrogen. In one embodiment, Y′ is S and R^{P} is a nitrogen protecting group (e.g., t-butoxycarbonyl (Boc), benzyloxycarbonyl (Cbz) or phenoxyacetyl (pac)).

[1255] In one embodiment, Y′ is O, R¹ is hydrogen and R^{P} is hydrogen. In one embodiment, Y′ is S, R¹ is hydrogen and R^{P} is hydrogen. In one embodiment, Y′ is O, R¹ is hydrogen and R^{P} is a nitrogen protecting group (e.g., t-butoxycarbonyl (Boc), benzyloxycarbonyl (Cbz) or phenoxyacetyl (pac)). In one embodiment, Y′ is S, R¹ is hydrogen and R^{P} is a nitrogen protecting group (e.g., t-butoxycarbonyl (Boc), benzyloxycarbonyl (Cbz) or phenoxyacetyl (pac)). In one embodiment, Y′ is O, R¹ is C₁₋₆alkyl (e.g., methyl or t-butyl) and R^{P} is hydrogen. In one embodiment, Y′ is S, R¹ is C₁₋₆alkyl (e.g., methyl or t-butyl) and R^{P} is hydrogen. In one embodiment, Y′ is O, R¹ is C₁₋₆alkyl (e.g., methyl or t-butyl) and R^{P} is a nitrogen protecting group (e.g., t-butoxycarbonyl (Boc), benzyloxycarbonyl (Cbz) or phenoxyacetyl (pac)). In one embodiment, Y′ is S, R¹ is C₁₋₆alkyl (e.g., methyl or t-butyl) and R^{P} is a nitrogen protecting group (e.g., t-butoxycarbonyl (Boc), benzyloxycarbonyl (Cbz) or phenoxyacetyl (pac)).

[1256] In another embodiment, the compound of Formula (X) is

[chemical structure]

wherein each m is independently an integer selected from 1-10; Y′ is O or S, and R^{P} and R¹, are as defined for Formula (X) or any embodiment thereof. In one embodiment, each m is independently an integer selected from 2-10; or 2-8, or 2-6.

[1257] In one embodiment, Y′ is O. In another embodiment, Y′ is S.

[1258] In one embodiment, R¹ is hydrogen. In another embodiment, R¹ is C₁₋₆alkyl (e.g., methyl or t-butyl).

[1259] In one embodiment, R^{P} is hydrogen. In another embodiment, R^{P} is a nitrogen protecting group (e.g., t-butoxycarbonyl (Boc), benzyloxycarbonyl (Cbz) or phenoxyacetyl (pac)).

[1260] In one embodiment, Y′ is O and R¹ is hydrogen. In one embodiment, Y′ is O and R¹ is C₁₋₆ alkyl (e.g., methyl or t-butyl). In one embodiment, Y′ is S and R¹ is hydrogen. In one embodiment, Y′ is S and R¹ is C₁₋₆alkyl (e.g., methyl ort-butyl).

[1261] In one embodiment, Y′ is O and R^{P} is hydrogen. In one embodiment, Y′ is O and R^{P} is a nitrogen protecting group (e.g., t-butoxycarbonyl (Boc), benzyloxycarbonyl (Cbz) or phenoxyacetyl (pac)). In one embodiment, Y′ is S and R^{P} is hydrogen. In one embodiment, Y′ is S and R^{P} is a nitrogen protecting group (e.g., t-butoxycarbonyl (Boc), benzyloxycarbonyl (Cbz) or phenoxyacetyl (pac)).

[1262] In one embodiment, Y′ is O, R¹ is hydrogen and R^{P} is hydrogen. In one embodiment, Y′ is S, R¹ is hydrogen and R^{P} is hydrogen. In one embodiment, Y′ is O, R¹ is hydrogen and R^{P} is a nitrogen protecting group (e.g., t-butoxycarbonyl (Boc), benzyloxycarbonyl (Cbz) or phenoxyacetyl (pac)). In one embodiment, Y′ is S, R¹ is hydrogen and R^{P} is a nitrogen protecting group (e.g., t-butoxycarbonyl (Boc), benzyloxycarbonyl (Cbz) or phenoxyacetyl (pac)). In one embodiment, Y′ is O, R¹ is C₁₋₆alkyl (e.g., methyl or t-butyl) and R^{P} is hydrogen. In one embodiment, Y′ is S, R¹ is C₁₋₆alkyl (e.g., methyl or t-butyl) and R^{P} is hydrogen. In one embodiment, Y′ is O, R¹ is C₁₋₆alkyl (e.g., methyl or t-butyl) and R^{P} is a nitrogen protecting group (e.g., t-butoxycarbonyl (Boc), benzyloxycarbonyl (Cbz) or phenoxyacetyl (pac)). In one embodiment, Y′ is S, R¹ is C₁₋₆alkyl (e.g., methyl or t-butyl) and R^{P} is a nitrogen protecting group (e.g., t-butoxycarbonyl (Boc), benzyloxycarbonyl (Cbz) or phenoxyacetyl (pac)).

[1263] In another embodiment, the compound of Formula (X) is

[chemical structure]

wherein Y′ is O or S, and R^{P} and R¹ are as defined for Formula (X) or any embodiment thereof.

[1264] In one embodiment, Y′ is O. In another embodiment, Y′ is S.

[1265] In one embodiment, R¹ is hydrogen. In another embodiment, R¹ is C₁₋₆alkyl (e.g., methyl or t-butyl).

[1266] In one embodiment, R^{P} is hydrogen. In another embodiment, R^{P} is a nitrogen protecting group (e.g., t-butoxycarbonyl (Boc), benzyloxycarbonyl (Cbz) or phenoxyacetyl (pac)).

[1267] In one embodiment, Y′ is O and R¹ is hydrogen. In one embodiment, Y′ is O and R¹ is C₁₋₆ alkyl (e.g., methyl or t-butyl). In one embodiment, Y′ is S and R¹ is hydrogen. In one embodiment, Y′ is S and R¹ is C₁₋₆alkyl (e.g., methyl ort-butyl).

[1268] In one embodiment, Y′ is O and R^{P} is hydrogen. In one embodiment, Y′ is O and R^{P} is a nitrogen protecting group (e.g., t-butoxycarbonyl (Boc), benzyloxycarbonyl (Cbz) or phenoxyacetyl (pac)). In one embodiment, Y′ is S and R^{P} is hydrogen. In one embodiment, Y′ is S and R^{P} is a nitrogen protecting group (e.g., t-butoxycarbonyl (Boc), benzyloxycarbonyl (Cbz) or phenoxyacetyl (pac)).

[1269] In one embodiment, Y′ is O, R¹ is hydrogen and R^{P} is hydrogen. In one embodiment, Y′ is S, R¹ is hydrogen and R^{P} is hydrogen. In one embodiment, Y′ is O, R¹ is hydrogen and R^{P} is a nitrogen protecting group (e.g., t-butoxycarbonyl (Boc), benzyloxycarbonyl (Cbz) or phenoxyacetyl (pac)). In one embodiment, Y′ is S, R¹ is hydrogen and R^{P} is a nitrogen protecting group (e.g., t-butoxycarbonyl (Boc), benzyloxycarbonyl (Cbz) or phenoxyacetyl (pac)). In one embodiment, Y′ is O, R¹ is C₁₋₆alkyl (e.g., methyl or t-butyl) and R^{P} is hydrogen. In one embodiment, Y′ is S, R¹ is C₁₋₆alkyl (e.g., methyl or t-butyl) and R^{P} is hydrogen. In one embodiment, Y′ is O, R¹ is C₁₋₆alkyl (e.g., methyl or t-butyl) and R^{P} is a nitrogen protecting group (e.g., t-butoxycarbonyl (Boc), benzyloxycarbonyl (Cbz) or phenoxyacetyl (pac)). In one embodiment, Y′ is S, R¹ is C₁₋₆alkyl (e.g., methyl or t-butyl) and R^{P} is a nitrogen protecting group (e.g., t-butoxycarbonyl (Boc), benzyloxycarbonyl (Cbz) or phenoxyacetyl (pac)).

[1270] In another embodiment, the compound of Formula (X) is

[chemical structure]

wherein Y′ is O or S, and R^{P}, R¹, L′, ZZ, and L are as defined for Formula (X) or any embodiment thereof.

[1271] In one embodiment, Y′ is O. In another embodiment, Y′ is S.

[1272] In one embodiment, R¹ is hydrogen. In another embodiment, R¹ is C₁₋₆alkyl (e.g., methyl or t-butyl).

[1273] In one embodiment, R^{P} is hydrogen. In another embodiment, R^{P} is a nitrogen protecting group (e.g., t-butoxycarbonyl (Boc), benzyloxycarbonyl (Cbz) or phenoxyacetyl (pac)).

[1274] In one embodiment, Y′ is O and R¹ is hydrogen. In one embodiment, Y′ is O and R¹ is C₁₋₆ alkyl (e.g., methyl or t-butyl). In one embodiment, Y′ is S and R¹ is hydrogen. In one embodiment, Y′ is S and R¹ is C₁₋₆alkyl (e.g., methyl ort-butyl).

[1275] In one embodiment, Y′ is O and R^{P} is hydrogen. In one embodiment, Y′ is O and R^{P} is a nitrogen protecting group (e.g., t-butoxycarbonyl (Boc), benzyloxycarbonyl (Cbz) or phenoxyacetyl (pac)). In one embodiment, Y′ is S and R^{P} is hydrogen. In one embodiment, Y′ is S and R^{P} is a nitrogen protecting group (e.g., t-butoxycarbonyl (Boc), benzyloxycarbonyl (Cbz) or phenoxyacetyl (pac)).

[1276] In one embodiment, Y′ is O, R¹ is hydrogen and R^{P} is hydrogen. In one embodiment, Y′ is S, R¹ is hydrogen and R^{P} is hydrogen. In one embodiment, Y′ is O, R¹ is hydrogen and R^{P} is a nitrogen protecting group (e.g., t-butoxycarbonyl (Boc), benzyloxycarbonyl (Cbz) or phenoxyacetyl (pac)). In one embodiment, Y′ is S, R¹ is hydrogen and R^{P} is a nitrogen protecting group (e.g., t-butoxycarbonyl (Boc), benzyloxycarbonyl (Cbz) or phenoxyacetyl (pac)). In one embodiment, Y′ is O, R¹ is C₁₋₆alkyl (e.g., methyl or t-butyl) and R^{P} is hydrogen. In one embodiment, Y′ is S, R¹ is C₁₋₆alkyl (e.g., methyl or t-butyl) and R^{P} is hydrogen. In one embodiment, Y′ is O, R¹ is C₁₋₆alkyl (e.g., methyl or t-butyl) and R^{P} is a nitrogen protecting group (e.g., t-butoxycarbonyl (Boc), benzyloxycarbonyl (Cbz) or phenoxyacetyl (pac)). In one embodiment, Y′ is S, R¹ is C₁₋₆alkyl (e.g., methyl or t-butyl) and R^{P} is a nitrogen protecting group (e.g., t-butoxycarbonyl (Boc), benzyloxycarbonyl (Cbz) or phenoxyacetyl (pac)).

[1277] In another embodiment, the compound of Formula (X) is

[chemical structure]

wherein Y′ is O or S, and R^{P}, R¹, L′, and L are as defined for Formula (X) or any embodiment thereof.

[1278] In one embodiment, Y′ is O. In another embodiment, Y′ is S.

[1279] In one embodiment, R¹ is hydrogen. In another embodiment, R¹ is C₁₋₆alkyl (e.g., methyl or t-butyl).

[1280] In one embodiment, R^{P} is hydrogen. In another embodiment, R^{P} is a nitrogen protecting group (e.g., t-butoxycarbonyl (Boc), benzyloxycarbonyl (Cbz) or phenoxyacetyl (pac)).

[1281] In one embodiment, Y′ is O and R¹ is hydrogen. In one embodiment, Y′ is O and R¹ is C₁₋₆ alkyl (e.g., methyl or t-butyl). In one embodiment, Y′ is S and R¹ is hydrogen. In one embodiment, Y′ is S and R¹ is C₁₋₆alkyl (e.g., methyl ort-butyl).

[1282] In one embodiment, Y′ is O and R^{P} is hydrogen. In one embodiment, Y′ is O and R^{P} is a nitrogen protecting group (e.g., t-butoxycarbonyl (Boc), benzyloxycarbonyl (Cbz) or phenoxyacetyl (pac)). In one embodiment, Y′ is S and R^{P} is hydrogen. In one embodiment, Y′ is S and R^{P} is a nitrogen protecting group (e.g., t-butoxycarbonyl (Boc), benzyloxycarbonyl (Cbz) or phenoxyacetyl (pac)).

[1283] In one embodiment, Y′ is O, R¹ is hydrogen and R^{P} is hydrogen. In one embodiment, Y′ is S, R¹ is hydrogen and R^{P} is hydrogen. In one embodiment, Y′ is O, R¹ is hydrogen and R^{P} is a nitrogen protecting group (e.g., t-butoxycarbonyl (Boc), benzyloxycarbonyl (Cbz) or phenoxyacetyl (pac)). In one embodiment, Y′ is S, R¹ is hydrogen and R^{P} is a nitrogen protecting group (e.g., t-butoxycarbonyl (Boc), benzyloxycarbonyl (Cbz) or phenoxyacetyl (pac)). In one embodiment, Y′ is O, R¹ is C₁₋₆alkyl (e.g., methyl or t-butyl) and R^{P} is hydrogen. In one embodiment, Y′ is S, R¹ is C₁₋₆alkyl (e.g., methyl or t-butyl) and R^{P} is hydrogen. In one embodiment, Y′ is O, R¹ is C₁₋₆alkyl (e.g., methyl or t-butyl) and R^{P} is a nitrogen protecting group (e.g., t-butoxycarbonyl (Boc), benzyloxycarbonyl (Cbz) or phenoxyacetyl (pac)). In one embodiment, Y′ is S, R¹ is C₁₋₆alkyl (e.g., methyl or t-butyl) and R^{P} is a nitrogen protecting group (e.g., t-butoxycarbonyl (Boc), benzyloxycarbonyl (Cbz) or phenoxyacetyl (pac)).

[1284] In another embodiment, the compound of Formula (X) is

[chemical structure]

wherein each m is independently an integer selected from 1-10; Y′ is O or S, and R^{P} and R¹ are as defined for Formula (X) or any embodiment thereof. In one embodiment, each m is independently an integer selected from 2-10; or 2-8, or 2-6.

[1285] In one embodiment, Y′ is O. In another embodiment, Y′ is S.

[1286] In one embodiment, R¹ is hydrogen. In another embodiment, R¹ is C₁₋₆alkyl (e.g., methyl or t-butyl).

[1287] In one embodiment, R^{P} is hydrogen. In another embodiment, R^{P} is a nitrogen protecting group (e.g., t-butoxycarbonyl (Boc), benzyloxycarbonyl (Cbz) or phenoxyacetyl (pac)).

[1288] In one embodiment, Y′ is O and R¹ is hydrogen. In one embodiment, Y′ is O and R¹ is C₁₋₆ alkyl (e.g., methyl or t-butyl). In one embodiment, Y′ is S and R¹ is hydrogen. In one embodiment, Y′ is S and R¹ is C₁₋₆alkyl (e.g., methyl ort-butyl).

[1289] In one embodiment, Y′ is O and R^{P} is hydrogen. In one embodiment, Y′ is O and R^{P} is a nitrogen protecting group (e.g., t-butoxycarbonyl (Boc), benzyloxycarbonyl (Cbz) or phenoxyacetyl (pac)). In one embodiment, Y′ is S and R^{P} is hydrogen. In one embodiment, Y′ is S and R^{P} is a nitrogen protecting group (e.g., t-butoxycarbonyl (Boc), benzyloxycarbonyl (Cbz) or phenoxyacetyl (pac)).

[1290] In one embodiment, Y′ is O, R¹ is hydrogen and R^{P} is hydrogen. In one embodiment, Y′ is S, R¹ is hydrogen and R^{P} is hydrogen. In one embodiment, Y′ is O, R¹ is hydrogen and R^{P} is a nitrogen protecting group (e.g., t-butoxycarbonyl (Boc), benzyloxycarbonyl (Cbz) or phenoxyacetyl (pac)). In one embodiment, Y′ is S, R¹ is hydrogen and R^{P} is a nitrogen protecting group (e.g., t-butoxycarbonyl (Boc), benzyloxycarbonyl (Cbz) or phenoxyacetyl (pac)). In one embodiment, Y′ is O, R¹ is C₁₋₆alkyl (e.g., methyl or t-butyl) and R^{P} is hydrogen. In one embodiment, Y′ is S, R¹ is C₁₋₆alkyl (e.g., methyl or t-butyl) and R^{P} is hydrogen. In one embodiment, Y′ is O, R¹ is C₁₋₆alkyl (e.g., methyl or t-butyl) and R^{P} is a nitrogen protecting group (e.g., t-butoxycarbonyl (Boc), benzyloxycarbonyl (Cbz) or phenoxyacetyl (pac)). In one embodiment, Y′ is S, R¹ is C₁₋₆alkyl (e.g., methyl or t-butyl) and R^{P} is a nitrogen protecting group (e.g., t-butoxycarbonyl (Boc), benzyloxycarbonyl (Cbz) or phenoxyacetyl (pac)).

[1291] In another embodiment, the compound of Formula (X) is

[chemical structure]

wherein Y′ is O or S, and R^{P} and R¹ are as defined for Formula (X) or any embodiment thereof.

[1292] In one embodiment, Y′ is O. In another embodiment, Y′ is S.

[1293] In one embodiment, R¹ is hydrogen. In another embodiment, R¹ is C₁₋₆alkyl (e.g., methyl or t-butyl).

[1294] In one embodiment, R^{P} is hydrogen. In another embodiment, R^{P} is a nitrogen protecting group (e.g., t-butoxycarbonyl (Boc), benzyloxycarbonyl (Cbz) or phenoxyacetyl (pac)).

[1295] In one embodiment, Y′ is O and R¹ is hydrogen. In one embodiment, Y′ is O and R¹ is C₁₋₆ alkyl (e.g., methyl or t-butyl). In one embodiment, Y′ is S and R¹ is hydrogen. In one embodiment, Y′ is S and R¹ is C₁₋₆alkyl (e.g., methyl ort-butyl).

[1296] In one embodiment, Y′ is O and R^{P} is hydrogen. In one embodiment, Y′ is O and R^{P} is a nitrogen protecting group (e.g., t-butoxycarbonyl (Boc), benzyloxycarbonyl (Cbz) or phenoxyacetyl (pac)). In one embodiment, Y′ is S and R^{P} is hydrogen. In one embodiment, Y′ is S and R^{P} is a nitrogen protecting group (e.g., t-butoxycarbonyl (Boc), benzyloxycarbonyl (Cbz) or phenoxyacetyl (pac)).

[1297] In one embodiment, Y′ is O, R¹ is hydrogen and R^{P} is hydrogen. In one embodiment, Y′ is S, R¹ is hydrogen and R^{P} is hydrogen. In one embodiment, Y′ is O, R¹ is hydrogen and R^{P} is a nitrogen protecting group (e.g., t-butoxycarbonyl (Boc), benzyloxycarbonyl (Cbz) or phenoxyacetyl (pac)). In one embodiment, Y′ is S, R¹ is hydrogen and R^{P} is a nitrogen protecting group (e.g., t-butoxycarbonyl (Boc), benzyloxycarbonyl (Cbz) or phenoxyacetyl (pac)). In one embodiment, Y′ is O, R¹ is C₁₋₆alkyl (e.g., methyl or t-butyl) and R^{P} is hydrogen. In one embodiment, Y′ is S, R¹ is C₁₋₆alkyl (e.g., methyl or t-butyl) and R^{P} is hydrogen. In one embodiment, Y′ is O, R¹ is C₁₋₆alkyl (e.g., methyl or t-butyl) and R^{P} is a nitrogen protecting group (e.g., t-butoxycarbonyl (Boc), benzyloxycarbonyl (Cbz) or phenoxyacetyl (pac)). In one embodiment, Y′ is S, R¹ is C₁₋₆alkyl (e.g., methyl or t-butyl) and R^{P} is a nitrogen protecting group (e.g., t-butoxycarbonyl (Boc), benzyloxycarbonyl (Cbz) or phenoxyacetyl (pac)).

### R^{T1}, Phosphorous Coupling Groups

[1298] In another embodiment, R^{P3}, when present, is a hydroxyl protecting group (e.g., according to any one of the preceding embodiments of R^{P3}) and R^{T1} is phosphorous coupling group

[1299] In another embodiment, R^{P3}, when present, is a hydroxyl protecting group (e.g., according to any one of the preceding embodiments of R^{P3}) and R^{T1} is phosphorous coupling group of the formula —P(Z)(X), wherein:
[1300] X is selected from the group consisting of
[1301] C₁₋₆alkyl (e.g., methyl),
[1302] C₁₋₆alkoxyC₁₋₆alkyl (e.g., 3-methoxypropyl),
[1303] C₁₋₆alkoxy (e.g., —OCH₃, —OCH₂CH₃, —OCH₂CH₂CH₃, —OCH₂CH(CH₃)₂), C₁₋₆alkoxy substituted with R (e.g., —OCH₂CH₂CN, —OCH₂CH₂Si(CH₃)₃, —OCH₂CH₂Si(CH₂CH₃)₃,

[chemical structure]

C₂₋₆alkenyloxy (e.g., —OC(H)═CH₂, —OCH₂C(H)═CH₂), phenoxy optionally substituted with 1, 2, 3, or 4 R groups.

[chemical structure]

benzyloxy optionally substituted with 1, 2, 3, or 4 R groups.

[chemical structure]

and
[1304] Z is selected from the group consisting of di(C₁₋₆alkyl)amino

[chemical structure]

and heterocyclyl optionally substituted with 1, 2, 3, or 4 R groups.

[chemical structure]

or
[1305] X and Z taken together with the phosphorus atom to which they are attached form a cyclic monocyclic or bicyclic heterocyclyl group that is optionally substituted with 1, 2, 3, or 4 R groups.

[1306] In another embodiment, R^{P3}, when present, is a hydroxyl protecting group (e.g., according to any one of the preceding embodiments of R^{P3}) and R^{T1} is phosphorous coupling group of the formula,

[chemical structure]

[chemical structure]

[1307] In another embodiment, R^{P3}, when present, is a hydroxyl protecting group (e.g., according to any one of the preceding embodiments of R^{P3}) and R^{T1} is

[chemical structure]

[1308] In another embodiment, R^{P3}, when present, is a hydroxyl protecting group (e.g., according to any one of the preceding embodiments of R^{P3}) and R^{T1} is phosphorous coupling group of the formula

[chemical structure]

or a salt thereof, wherein Y is O or S; and R^{T2} is hydrogen or —C(O)C₁₋₆alkyl.

[1309] In another embodiment, R^{P3}, when present, is a hydroxyl protecting group (e.g., according to any one of the preceding embodiments of R^{P3}) and R^{T1} is phosphorous coupling group of the formula

[chemical structure]

or a salt thereof.

### Solid Supports

[1310] In another embodiment, R^{P3}, when present, is a hydroxyl protecting group (e.g., according to any one of the preceding embodiments of R^{P3}) and R^{T1} is -L^{K}-S^{S}, wherein L^{K} is a support linking group and S^{S} is a solid support, —OR^{SS} or —N(R^{SS})₂, or hydrogen, wherein each R^{SS} is independently hydrogen or C₁₋₆alkyl.

[1311] In another embodiment, R^{P3}, when present, is a hydroxyl protecting group (e.g., according to any one of the preceding embodiments of R^{P3}) and R^{T1} is -L^{K}-S^{S}, wherein L^{K} is a support linking group and SS is —OR^{SS} or —N(R^{SS})₂.

[1312] In another embodiment, R^{P3}, when present, is a hydroxyl protecting group (e.g., according to any one of the preceding embodiments of R^{P3}) and R^{T1} is -L^{K}-S^{S}, wherein L^{K} is a support linking group of the formula: —C(O)(CH₂)ₙC(O)—, wherein n is 1-20; and S^{S} is —OR^{SS} (e.g., —OH).

[1313] In another embodiment, R^{P3}, when present, is a hydroxyl protecting group (e.g., according to any one of the preceding embodiments of R^{P3}) and R^{T1} is -L^{K}-S^{S}, wherein L^{K} is a support linking group of the formula: —C(O)CH₂CH₂C(O)—, wherein n is 1-20; and S^{S} is —OR^{SS} (e.g., —OH).

[1314] In another embodiment, R^{P3}, when present, is a hydroxyl protecting group (e.g., according to any one of the preceding embodiments of R^{P3}) and R^{T1} is -L^{K}-S^{S}, wherein S^{S} is a solid support.

[1315] In another embodiment, R^{P3}, when present, is a hydroxyl protecting group (e.g., according to any one of the preceding embodiments of R^{P3}) and R^{T1} is -L^{K}-S^{S}, wherein S^{S} is a controlled pore glass (CPG),

[1316] In another embodiment, R^{P3}, when present, is a hydroxyl protecting group (e.g., according to any one of the preceding embodiments of R^{P3}) and R^{T1} is -L^{K}-S^{S}, wherein S^{S} is a polystyrene (e.g., cross-linked polystyrene).

[1317] In an embodiment of each of the preceding, L^{K} is

[chemical structure]

wherein q is 0 or an integer selected from 1-20. In an embodiment of each of the preceding, L^{K} is

[chemical structure]

[1318] In an embodiment of each of the preceding, L^{K} is

[chemical structure]

wherein q is 0 or an integer selected from 1-20, and * represents the bond to SS (i.e. to a functional group on the surface of S^{S}).

[1319] In an embodiment of each of the preceding, R^{P3}, when present, is a hydroxyl protecting group (e.g., according to any one of the preceding embodiments of R^{P3}) and R^{T} is

[chemical structure]

wherein [symbol] is the solid support.

[1320] In an embodiment of each of the preceding, R^{P3}, when present, is a hydroxyl protecting group (e.g., according to any one of the preceding embodiments of R^{P3}) and R^{T} is

[chemical structure]

wherein [symbol] is the solid support.

[1321] In an embodiment of each of the preceding, R^{P3}, when present, is a hydroxyl protecting group (e.g., according to any one of the preceding embodiments of R^{P3}) and R^{T} is

[chemical structure]

[1322] In another embodiment, the compound of Formula (X) is

[chemical structure]

wherein [symbol] represents a solid support; Q is O or NH, and R¹, R^{Y}, Y, R^{P3}. L′, ZZ, and L are as defined for Formula (X) or any embodiment thereof. In one embodiment, R¹ is hydrogen. In another embodiment, R¹ is C₁₋₆alkyl (e.g., methyl or t-butyl). In one embodiment, R^{P3} is hydrogen. In another embodiment, R^{P3} is hydroxyl protecting group (e.g., 4,4′-dimethyoxytrityl (DMTr)).

[1323] In another embodiment, the compound of Formula (X) is

[chemical structure]

wherein [symbol] represents a solid support; Q is O or NH, and R¹, R^{P}, R^{P3}, R¹, L′, ZZ, and L are as defined for Formula (X) or any embodiment thereof.

[1324] In one embodiment, R^{P3} is a hydrogen. In another embodiment, R^{P3} is a hydroxyl protecting group (e.g., DMTr).

[1325] In one embodiment, R¹ is hydrogen. In another embodiment, R¹ is C₁₋₆alkyl (e.g., methyl or t-butyl).

[1326] In one embodiment, R^{P} is hydrogen. In another embodiment, R^{P} is a nitrogen protecting group (e.g., t-butoxycarbonyl (Boc), benzyloxycarbonyl (Cbz) or phenoxyacetyl (pac)).

[1327] In one embodiment, R³ is hydrogen and R¹ is hydrogen. In one embodiment, R^{P3} is hydrogen and R¹ is C₁₋₆alkyl (e.g., methyl or t-butyl). In one embodiment, R^{P3} is a hydroxyl protecting group (e.g., DMTr) and R¹ is hydrogen. In one embodiment, R^{P3} is a hydroxyl protecting group (e.g., DMTr) and R¹ is C₁₋₆alkyl (e.g., methyl ort-butyl).

[1328] In one embodiment, R³ is hydrogen and R^{P} is hydrogen. In one embodiment, R^{P3} is hydrogen and R^{P} is a nitrogen protecting group (e.g., t-butoxycarbonyl (Boc), benzyloxycarbonyl (Cbz) or phenoxyacetyl (pac)). In one embodiment, R^{P3} is a hydroxyl protecting group (e.g., DMTr) and R^{P} is hydrogen. In one embodiment, R^{P3} is a hydroxyl protecting group (e.g., DMTr) and R^{P} is a nitrogen protecting group (e.g., t-butoxycarbonyl (Boc), benzyloxycarbonyl (Cbz) or phenoxyacetyl (pac)).

[1329] In one embodiment, R^{P3} is hydrogen, R¹ is hydrogen and R^{P} is hydrogen. In one embodiment, R^{P3} is a hydroxyl protecting group (e.g., DMTr), R¹ is hydrogen and R^{P} is hydrogen. In one embodiment, R^{P3} is hydrogen, R¹ is hydrogen and R^{P} is a nitrogen protecting group (e.g., t-butoxycarbonyl (Boc), benzyloxycarbonyl (Cbz) or phenoxyacetyl (pac)). In one embodiment, R^{P3} is a hydroxyl protecting group (e.g., DMTr), R¹ is hydrogen and R^{P} is a nitrogen protecting group (e.g., t-butoxycarbonyl (Boc), benzyloxycarbonyl (Cbz) or phenoxyacetyl (pac)). In one embodiment, R^{P3} is hydrogen, R¹ is C₁₋₆alkyl (e.g., methyl or t-butyl) and R^{P} is hydrogen. In one embodiment, R^{P3} is a hydroxyl protecting group (e.g., DMTr), R¹ is C₁₋₆alkyl (e.g., methyl or t-butyl) and R^{P} is hydrogen. In one embodiment, R^{P3} is hydrogen, R¹ is C₁₋₆alkyl (e.g., methyl or t-butyl) and R^{P} is a nitrogen protecting group (e.g., t-butoxycarbonyl (Boc), benzyloxycarbonyl (Cbz) or phenoxyacetyl (pac)). In one embodiment, R^{P3} is a hydroxyl protecting group (e.g., DMTr), R¹ is C₁₋₆alkyl (e.g., methyl or t-butyl) and R^{P} is a nitrogen protecting group (e.g., t-butoxycarbonyl (Boc), benzyloxycarbonyl (Cbz) or phenoxyacetyl (pac)).

[1330] In another embodiment, the compound of Formula (X) is

[chemical structure]

wherein [symbol] represents a solid support; Q is O or NH, and R¹, R^{P}, R^{P3}, R¹, L′, ZZ, and L are as defined for Formula (X) or any embodiment thereof.

[1331] In one embodiment, R^{P3} is a hydrogen. In another embodiment, R^{P3} is a hydroxyl protecting group (e.g., DMTr).

[1332] In one embodiment, R¹ is hydrogen. In another embodiment, R¹ is C₁₋₆alkyl (e.g., methyl or t-butyl).

[1333] In one embodiment, R^{P} is hydrogen. In another embodiment, R^{P} is a nitrogen protecting group (e.g., t-butoxycarbonyl (Boc), benzyloxycarbonyl (Cbz) or phenoxyacetyl (pac)).

[1334] In one embodiment, R^{P3} is hydrogen and R¹ is hydrogen. In one embodiment, R^{P3} is hydrogen and R¹ is C₁₋₆alkyl (e.g., methyl or t-butyl). In one embodiment, R^{P3} is a hydroxyl protecting group (e.g., DMTr) and R¹ is hydrogen. In one embodiment, R^{P3} is a hydroxyl protecting group (e.g., DMTr) and R¹ is C₁₋₆alkyl (e.g., methyl ort-butyl).

[1335] In one embodiment, R^{P3} is hydrogen and R^{P} is hydrogen. In one embodiment, R^{P3} is hydrogen and R^{P} is a nitrogen protecting group (e.g., t-butoxycarbonyl (Boc), benzyloxycarbonyl (Cbz) or phenoxyacetyl (pac)). In one embodiment, R^{P3} is a hydroxyl protecting group (e.g., DMTr) and R^{P} is hydrogen. In one embodiment, R^{P3} is a hydroxyl protecting group (e.g., DMTr) and R^{P} is a nitrogen protecting group (e.g., t-butoxycarbonyl (Boc), benzyloxycarbonyl (Cbz) or phenoxyacetyl (pac)).

[1336] In one embodiment, R^{P3} is hydrogen, R¹ is hydrogen and R^{P} is hydrogen. In one embodiment, R^{P3} is a hydroxyl protecting group (e.g., DMTr), R¹ is hydrogen and R^{P} is hydrogen. In one embodiment, R^{P3} is hydrogen, R¹ is hydrogen and R^{P} is a nitrogen protecting group (e.g., t-butoxycarbonyl (Boc), benzyloxycarbonyl (Cbz) or phenoxyacetyl (pac)). In one embodiment, R^{P3} is a hydroxyl protecting group (e.g., DMTr), R¹ is hydrogen and R^{P} is a nitrogen protecting group (e.g., t-butoxycarbonyl (Boc), benzyloxycarbonyl (Cbz) or phenoxyacetyl (pac)). In one embodiment, R^{P3} is hydrogen, R¹ is C₁₋₆alkyl (e.g., methyl or t-butyl) and R^{P} is hydrogen. In one embodiment, R^{P3} is a hydroxyl protecting group (e.g., DMTr), R¹ is C₁₋₆alkyl (e.g., methyl or t-butyl) and R^{P} is hydrogen. In one embodiment, R^{P3} is hydrogen, R¹ is C₁₋₆alkyl (e.g., methyl or t-butyl) and R^{P} is a nitrogen protecting group (e.g., t-butoxycarbonyl (Boc), benzyloxycarbonyl (Cbz) or phenoxyacetyl (pac)). In one embodiment, R^{P3} is a hydroxyl protecting group (e.g., DMTr), R¹ is C₁₋₆alkyl (e.g., methyl or t-butyl) and R^{P} is a nitrogen protecting group (e.g., t-butoxycarbonyl (Boc), benzyloxycarbonyl (Cbz) or phenoxyacetyl (pac)).

[1337] In another embodiment, the compound of Formula (X) is

[chemical structure]

wherein [symbol] represents a solid support; Q is O or NH, and R^{P}, R^{P3}, R¹, L′, and L are as defined for Formula (X) or any embodiment thereof.

[1338] In one embodiment, R^{P3} is a hydrogen. In another embodiment, R^{P3} is a hydroxyl protecting group (e.g., DMTr).

[1339] In one embodiment, R¹ is hydrogen. In another embodiment, R¹ is C₁₋₆alkyl (e.g., methyl or t-butyl).

[1340] In one embodiment, R^{P} is hydrogen. In another embodiment, R^{P} is a nitrogen protecting group (e.g., t-butoxycarbonyl (Boc), benzyloxycarbonyl (Cbz) or phenoxyacetyl (pac)).

[1341] In one embodiment, R^{P3} is hydrogen and R¹ is hydrogen. In one embodiment, R^{P3} is hydrogen and R¹ is C₁₋₆alkyl (e.g., methyl or t-butyl). In one embodiment, R^{P3} is a hydroxyl protecting group (e.g., DMTr) and R¹ is hydrogen. In one embodiment, R^{P3} is a hydroxyl protecting group (e.g., DMTr) and R¹ is C₁₋₆alkyl (e.g., methyl ort-butyl).

[1342] In one embodiment, R^{P3} is hydrogen and R^{P} is hydrogen. In one embodiment, R^{P3} is hydrogen and R^{P} is a nitrogen protecting group (e.g., t-butoxycarbonyl (Boc), benzyloxycarbonyl (Cbz) or phenoxyacetyl (pac)). In one embodiment, R^{P3} is a hydroxyl protecting group (e.g., DMTr) and R^{P} is hydrogen. In one embodiment, R^{P3} is a hydroxyl protecting group (e.g., DMTr) and R^{P} is a nitrogen protecting group (e.g., t-butoxycarbonyl (Boc), benzyloxycarbonyl (Cbz) or phenoxyacetyl (pac)).

[1343] In one embodiment, R^{P3} is hydrogen, R¹ is hydrogen and R^{P} is hydrogen. In one embodiment, R^{P3} is a hydroxyl protecting group (e.g., DMTr), R¹ is hydrogen and R^{P} is hydrogen. In one embodiment, R^{P3} is hydrogen, R¹ is hydrogen and R^{P} is a nitrogen protecting group (e.g., t-butoxycarbonyl (Boc), benzyloxycarbonyl (Cbz) or phenoxyacetyl (pac)). In one embodiment, R^{P3} is a hydroxyl protecting group (e.g., DMTr), R¹ is hydrogen and R^{P} is a nitrogen protecting group (e.g., t-butoxycarbonyl (Boc), benzyloxycarbonyl (Cbz) or phenoxyacetyl (pac)). In one embodiment, R^{P3} is hydrogen, R¹ is C₁₋₆alkyl (e.g., methyl or t-butyl) and R^{P} is hydrogen. In one embodiment, R^{P3} is a hydroxyl protecting group (e.g., DMTr), R¹ is C₁₋₆alkyl (e.g., methyl or t-butyl) and R^{P} is hydrogen.

[1344] In one embodiment, R^{P3} is hydrogen, R¹ is C₁₋₆alkyl (e.g., methyl or t-butyl) and R^{P} is a nitrogen protecting group (e.g., t-butoxycarbonyl (Boc), benzyloxycarbonyl (Cbz) or phenoxyacetyl (pac)). In one embodiment, R^{P3} is a hydroxyl protecting group (e.g., DMTr), R¹ is C₁₋₆alkyl (e.g., methyl or t-butyl) and R^{P} is a nitrogen protecting group (e.g., t-butoxycarbonyl (Boc), benzyloxycarbonyl (Cbz) or phenoxyacetyl (pac)).

[1345] In another embodiment, the compound of Formula (X) is

[chemical structure]

wherein each m is independently an integer selected from 1-10; [symbol] represents a solid support; Q is O or NH, and R^{P}, R^{P3}, and R¹ are as defined for Formula (X) or any embodiment thereof. In one embodiment, each m is independently an integer selected from 2-10; or 2-8, or 2-6.

[1346] In one embodiment, R^{P3} is a hydrogen. In another embodiment, R^{P3} is a hydroxyl protecting group (e.g., DMTr).

[1347] In one embodiment, R¹ is hydrogen. In another embodiment, R¹ is C₁₋₆alkyl (e.g., methyl or t-butyl).

[1348] In one embodiment, R^{P} is hydrogen. In another embodiment, R^{P} is a nitrogen protecting group (e.g., t-butoxycarbonyl (Boc), benzyloxycarbonyl (Cbz) or phenoxyacetyl (pac)).

[1349] In one embodiment, R^{P3} is hydrogen and R¹ is hydrogen. In one embodiment, R^{P3} is hydrogen and R¹ is C₁₋₆alkyl (e.g., methyl or t-butyl). In one embodiment, R^{P3} is a hydroxyl protecting group (e.g., DMTr) and R¹ is hydrogen. In one embodiment, R^{P3} is a hydroxyl protecting group (e.g., DMTr) and R¹ is C₁₋₆alkyl (e.g., methyl ort-butyl).

[1350] In one embodiment, R^{P3} is hydrogen and R^{P} is hydrogen. In one embodiment, R^{P3} is hydrogen and R^{P} is a nitrogen protecting group (e.g., t-butoxycarbonyl (Boc), benzyloxycarbonyl (Cbz) or phenoxyacetyl (pac)). In one embodiment, R^{P3} is a hydroxyl protecting group (e.g., DMTr) and R^{P} is hydrogen. In one embodiment, R^{P3} is a hydroxyl protecting group (e.g., DMTr) and R^{P} is a nitrogen protecting group (e.g., t-butoxycarbonyl (Boc), benzyloxycarbonyl (Cbz) or phenoxyacetyl (pac)).

[1351] In one embodiment, R^{P3} is hydrogen, R¹ is hydrogen and R^{P} is hydrogen. In one embodiment, R^{P3} is a hydroxyl protecting group (e.g., DMTr), R¹ is hydrogen and R^{P} is hydrogen. In one embodiment, R^{P3} is hydrogen, R¹ is hydrogen and R^{P} is a nitrogen protecting group (e.g., t-butoxycarbonyl (Boc), benzyloxycarbonyl (Cbz) or phenoxyacetyl (pac)). In one embodiment, R^{P3} is a hydroxyl protecting group (e.g., DMTr), R¹ is hydrogen and R^{P} is a nitrogen protecting group (e.g., t-butoxycarbonyl (Boc), benzyloxycarbonyl (Cbz) or phenoxyacetyl (pac)). In one embodiment, R^{P3} is hydrogen, R¹ is C₁₋₆alkyl (e.g., methyl or t-butyl) and R^{P} is hydrogen. In one embodiment, R^{P3} is a hydroxyl protecting group (e.g., DMTr), R¹ is C₁₋₆alkyl (e.g., methyl or t-butyl) and R^{P} is hydrogen.

[1352] In one embodiment, R^{P3} is hydrogen, R¹ is C₁₋₆alkyl (e.g., methyl or t-butyl) and R^{P} is a nitrogen protecting group (e.g., t-butoxycarbonyl (Boc), benzyloxycarbonyl (Cbz) or phenoxyacetyl (pac)). In one embodiment, R^{P3} is a hydroxyl protecting group (e.g., DMTr), R¹ is C₁₋₆alkyl (e.g., methyl or t-butyl) and R^{P} is a nitrogen protecting group (e.g., t-butoxycarbonyl (Boc), benzyloxycarbonyl (Cbz) or phenoxyacetyl (pac)).

[1353] In another embodiment, the compound of Formula (X) is

[chemical structure]

wherein [symbol] represents a solid support; Q is O or NH, and R^{P}, R^{P3} and R¹, are as defined for Formula (X) or any embodiment thereof and R^{P}, R¹, L′, ZZ, and L are as defined for Formula (X) or any embodiment thereof.

[1354] In one embodiment, R^{P3} is a hydrogen. In another embodiment, R^{P3} is a hydroxyl protecting group (e.g., DMTr).

[1355] In one embodiment, R¹ is hydrogen. In another embodiment, R¹ is C₁₋₆alkyl (e.g., methyl or t-butyl).

[1356] In one embodiment, R^{P} is hydrogen. In another embodiment, R^{P} is a nitrogen protecting group (e.g., t-butoxycarbonyl (Boc), benzyloxycarbonyl (Cbz) or phenoxyacetyl (pac)).

[1357] In one embodiment, R^{P3} is hydrogen and R¹ is hydrogen. In one embodiment, R^{P3} is hydrogen and R¹ is C₁₋₆alkyl (e.g., methyl or t-butyl). In one embodiment, R^{P3} is a hydroxyl protecting group (e.g., DMTr) and R¹ is hydrogen. In one embodiment, R^{P3} is a hydroxyl protecting group (e.g., DMTr) and R¹ is C₁₋₆alkyl (e.g., methyl ort-butyl).

[1358] In one embodiment, R^{P3} is hydrogen and R^{P} is hydrogen. In one embodiment, R^{P3} is hydrogen and R^{P} is a nitrogen protecting group (e.g., t-butoxycarbonyl (Boc), benzyloxycarbonyl (Cbz) or phenoxyacetyl (pac)). In one embodiment, R^{P3} is a hydroxyl protecting group (e.g., DMTr) and R^{P} is hydrogen. In one embodiment, R^{P3} is a hydroxyl protecting group (e.g., DMTr) and R^{P} is a nitrogen protecting group (e.g., t-butoxycarbonyl (Boc), benzyloxycarbonyl (Cbz) or phenoxyacetyl (pac)).

[1359] In one embodiment, R^{P3} is hydrogen, R¹ is hydrogen and R^{P} is hydrogen. In one embodiment, R^{P3} is a hydroxyl protecting group (e.g., DMTr), R¹ is hydrogen and R^{P} is hydrogen. In one embodiment, R^{P3} is hydrogen, R¹ is hydrogen and R^{P} is a nitrogen protecting group (e.g., t-butoxycarbonyl (Boc), benzyloxycarbonyl (Cbz) or phenoxyacetyl (pac)). In one embodiment, R^{P3} is a hydroxyl protecting group (e.g., DMTr), R¹ is hydrogen and R^{P} is a nitrogen protecting group (e.g., t-butoxycarbonyl (Boc), benzyloxycarbonyl (Cbz) or phenoxyacetyl (pac)). In one embodiment, R^{P3} is hydrogen, R¹ is C₁₋₆alkyl (e.g., methyl or t-butyl) and R^{P} is hydrogen. In one embodiment, R^{P3} is a hydroxyl protecting group (e.g., DMTr), R¹ is C₁₋₆alkyl (e.g., methyl or t-butyl) and R^{P} is hydrogen. In one embodiment, R^{P3} is hydrogen, R¹ is C₁₋₆alkyl (e.g., methyl or t-butyl) and R^{P} is a nitrogen protecting group (e.g., t-butoxycarbonyl (Boc), benzyloxycarbonyl (Cbz) or phenoxyacetyl (pac)). In one embodiment, R^{P3} is a hydroxyl protecting group (e.g., DMTr), R¹ is C₁₋₆alkyl (e.g., methyl or t-butyl) and R^{P} is a nitrogen protecting group (e.g., t-butoxycarbonyl (Boc), benzyloxycarbonyl (Cbz) or phenoxyacetyl (pac)).

[1360] In another embodiment, the compound of Formula (X) is

[chemical structure]

wherein [symbol] represents a solid support; Q is O or NH, and R^{P}, R^{P3}, R¹, L′, ZZ, and L are as defined for Formula (X) or any embodiment thereof.

[1361] In one embodiment, R^{P3} is a hydrogen. In another embodiment, R^{P3} is a hydroxyl protecting group (e.g., DMTr).

[1362] In one embodiment, R¹ is hydrogen. In another embodiment, R¹ is C₁₋₆alkyl (e.g., methyl or t-butyl).

[1363] In one embodiment, R^{P} is hydrogen. In another embodiment, R^{P} is a nitrogen protecting group (e.g., t-butoxycarbonyl (Boc), benzyloxycarbonyl (Cbz) or phenoxyacetyl (pac)).

[1364] In one embodiment, R^{P3} is hydrogen and R¹ is hydrogen. In one embodiment, R^{P3} is hydrogen and R¹ is C₁₋₆alkyl (e.g., methyl or t-butyl). In one embodiment, R^{P3} is a hydroxyl protecting group (e.g., DMTr) and R¹ is hydrogen. In one embodiment, R^{P3} is a hydroxyl protecting group (e.g., DMTr) and R¹ is C₁₋₆alkyl (e.g., methyl ort-butyl).

[1365] In one embodiment, R^{P3} is hydrogen and R^{P} is hydrogen. In one embodiment, R^{P3} is hydrogen and R^{P} is a nitrogen protecting group (e.g., t-butoxycarbonyl (Boc), benzyloxycarbonyl (Cbz) or phenoxyacetyl (pac)). In one embodiment, R^{P3} is a hydroxyl protecting group (e.g., DMTr) and R^{P} is hydrogen. In one embodiment, R^{P3} is a hydroxyl protecting group (e.g., DMTr) and R^{P} is a nitrogen protecting group (e.g., t-butoxycarbonyl (Boc), benzyloxycarbonyl (Cbz) or phenoxyacetyl (pac)).

[1366] In one embodiment, R^{P3} is hydrogen, R¹ is hydrogen and R^{P} is hydrogen. In one embodiment, R^{P3} is a hydroxyl protecting group (e.g., DMTr), R¹ is hydrogen and R^{P} is hydrogen. In one embodiment, R^{P3} is hydrogen, R¹ is hydrogen and R^{P} is a nitrogen protecting group (e.g., t-butoxycarbonyl (Boc), benzyloxycarbonyl (Cbz) or phenoxyacetyl (pac)). In one embodiment, R^{P3} is a hydroxyl protecting group (e.g., DMTr), R¹ is hydrogen and R^{P} is a nitrogen protecting group (e.g., t-butoxycarbonyl (Boc), benzyloxycarbonyl (Cbz) or phenoxyacetyl (pac)). In one embodiment, R^{P3} is hydrogen, R¹ is C₁₋₆alkyl (e.g., methyl or t-butyl) and R^{P} is hydrogen. In one embodiment, R^{P3} is a hydroxyl protecting group (e.g., DMTr), R¹ is C₁₋₆alkyl (e.g., methyl or t-butyl) and R^{P} is hydrogen. In one embodiment, R^{P3} is hydrogen, R¹ is C₁._alkyl (e.g., methyl or t-butyl) and R^{P} is a nitrogen protecting group (e.g., t-butoxycarbonyl (Boc), benzyloxycarbonyl (Cbz) or phenoxyacetyl (pac)). In one embodiment, R^{P3} is a hydroxyl protecting group (e.g., DMTr), R¹ is C₁._alkyl (e.g., methyl or t-butyl) and R^{P} is a nitrogen protecting group (e.g., t-butoxycarbonyl (Boc), benzyloxycarbonyl (Cbz) or phenoxyacetyl (pac)).

[1367] In another embodiment, the compound of Formula (X) is

[chemical structure]

wherein [symbol] represents a solid support; Q is O or NH, and R^{P}, R^{P3}, R¹, L′ and L are as defined for Formula (X) or any embodiment thereof.

[1368] In one embodiment, R^{P3} is a hydrogen. In another embodiment, R^{P3} is a hydroxyl protecting group (e.g., DMTr).

[1369] In one embodiment, R¹ is hydrogen. In another embodiment, R¹ is C₁₋₆alkyl (e.g., methyl or t-butyl).

[1370] In one embodiment, R^{P} is hydrogen. In another embodiment, R^{P} is a nitrogen protecting group (e.g., t-butoxycarbonyl (Boc), benzyloxycarbonyl (Cbz) or phenoxyacetyl (pac)).

[1371] In one embodiment, R^{P3} is hydrogen and R¹ is hydrogen. In one embodiment, R^{P3} is hydrogen and R¹ is C₁₋₆alkyl (e.g., methyl or t-butyl). In one embodiment, R^{P3} is a hydroxyl protecting group (e.g., DMTr) and R¹ is hydrogen. In one embodiment, R^{P3} is a hydroxyl protecting group (e.g., DMTr) and R¹ is C₁₋₆alkyl (e.g., methyl ort-butyl).

[1372] In one embodiment, R^{P3} is hydrogen and R^{P} is hydrogen. In one embodiment, R^{P3} is hydrogen and R^{P} is a nitrogen protecting group (e.g., t-butoxycarbonyl (Boc), benzyloxycarbonyl (Cbz) or phenoxyacetyl (pac)). In one embodiment, R^{P3} is a hydroxyl protecting group (e.g., DMTr) and R^{P} is hydrogen. In one embodiment, R^{P3} is a hydroxyl protecting group (e.g., DMTr) and R^{P} is a nitrogen protecting group (e.g., t-butoxycarbonyl (Boc), benzyloxycarbonyl (Cbz) or phenoxyacetyl (pac)).

[1373] In one embodiment, R^{P3} is hydrogen, R¹ is hydrogen and R^{P} is hydrogen. In one embodiment, R^{P3} is a hydroxyl protecting group (e.g., DMTr), R¹ is hydrogen and R^{P} is hydrogen. In one embodiment, R^{P3} is hydrogen, R¹ is hydrogen and R^{P} is a nitrogen protecting group (e.g., t-butoxycarbonyl (Boc), benzyloxycarbonyl (Cbz) or phenoxyacetyl (pac)). In one embodiment, R^{P3} is a hydroxyl protecting group (e.g., DMTr), R¹ is hydrogen and R^{P} is a nitrogen protecting group (e.g., t-butoxycarbonyl (Boc), benzyloxycarbonyl (Cbz) or phenoxyacetyl (pac)). In one embodiment, R^{P3} is hydrogen, R¹ is C₁₋₆alkyl (e.g., methyl or t-butyl) and R^{P} is hydrogen. In one embodiment, R^{P3} is a hydroxyl protecting group (e.g., DMTr), R¹ is C₁₋₆alkyl (e.g., methyl or t-butyl) and R^{P} is hydrogen. In one embodiment, R^{P3} is hydrogen, R¹ is C₁₋₆alkyl (e.g., methyl or t-butyl) and R^{P} is a nitrogen protecting group (e.g., t-butoxycarbonyl (Boc), benzyloxycarbonyl (Cbz) or phenoxyacetyl (pac)). In one embodiment, R^{P3} is a hydroxyl protecting group (e.g., DMTr), R¹ is C₁₋₆alkyl (e.g., methyl or t-butyl) and R^{P} is a nitrogen protecting group (e.g., t-butoxycarbonyl (Boc), benzyloxycarbonyl (Cbz) or phenoxyacetyl (pac)).

[1374] In another embodiment, the compound of Formula (X) is

[chemical structure]

wherein each m is independently an integer selected from 1-10; [symbol] represents a solid support; Q is O or NH, and R^{P}, R^{P3}, and R¹ are as defined for Formula (X) or any embodiment thereof. In one embodiment, each m is independently an integer selected from 2-10; or 2-8, or 2-6.

[1375] In one embodiment, R^{P3} is a hydrogen. In another embodiment, R^{P3} is a hydroxyl protecting group (e.g., DMTr).

[1376] In one embodiment, R¹ is hydrogen. In another embodiment, R¹ is C₁₋₆alkyl (e.g., methyl or t-butyl).

[1377] In one embodiment, R^{P} is hydrogen. In another embodiment, R^{P} is a nitrogen protecting group (e.g., t-butoxycarbonyl (Boc), benzyloxycarbonyl (Cbz) or phenoxyacetyl (pac)).

[1378] In one embodiment, R^{P3} is hydrogen and R¹ is hydrogen. In one embodiment, R^{P3} is hydrogen and R¹ is C₁₋₆alkyl (e.g., methyl or t-butyl). In one embodiment, R^{P3} is a hydroxyl protecting group (e.g., DMTr) and R¹ is hydrogen. In one embodiment, R^{P3} is a hydroxyl protecting group (e.g., DMTr) and R¹ is C₁₋₆alkyl (e.g., methyl ort-butyl).

[1379] In one embodiment, R^{P3} is hydrogen and R^{P} is hydrogen. In one embodiment, R^{P3} is hydrogen and R^{P} is a nitrogen protecting group (e.g., t-butoxycarbonyl (Boc), benzyloxycarbonyl (Cbz) or phenoxyacetyl (pac)). In one embodiment, R^{P3} is a hydroxyl protecting group (e.g., DMTr) and R^{P} is hydrogen. In one embodiment, R^{P3} is a hydroxyl protecting group (e.g., DMTr) and R^{P} is a nitrogen protecting group (e.g., t-butoxycarbonyl (Boc), benzyloxycarbonyl (Cbz) or phenoxyacetyl (pac)).

[1380] In one embodiment, R^{P3} is hydrogen, R¹ is hydrogen and R^{P} is hydrogen. In one embodiment, R^{P3} is a hydroxyl protecting group (e.g., DMTr), R¹ is hydrogen and R^{P} is hydrogen. In one embodiment, R^{P3} is hydrogen, R¹ is hydrogen and R^{P} is a nitrogen protecting group (e.g., t-butoxycarbonyl (Boc), benzyloxycarbonyl (Cbz) or phenoxyacetyl (pac)). In one embodiment, R^{P3} is a hydroxyl protecting group (e.g., DMTr), R¹ is hydrogen and R^{P} is a nitrogen protecting group (e.g., t-butoxycarbonyl (Boc), benzyloxycarbonyl (Cbz) or phenoxyacetyl (pac)). In one embodiment, R^{P3} is hydrogen, R¹ is C₁₋₆alkyl (e.g., methyl or t-butyl) and R^{P} is hydrogen. In one embodiment, R^{P3} is a hydroxyl protecting group (e.g., DMTr), R¹ is C₁₋₆alkyl (e.g., methyl or t-butyl) and R^{P} is hydrogen. In one embodiment, R^{P3} is hydrogen, R¹ is C₁₋₆alkyl (e.g., methyl or t-butyl) and R^{P} is a nitrogen protecting group (e.g., t-butoxycarbonyl (Boc), benzyloxycarbonyl (Cbz) or phenoxyacetyl (pac)). In one embodiment, R^{P3} is a hydroxyl protecting group (e.g., DMTr), R¹ is C₁₋₆alkyl (e.g., methyl or t-butyl) and R^{P} is a nitrogen protecting group (e.g., t-butoxycarbonyl (Boc), benzyloxycarbonyl (Cbz) or phenoxyacetyl (pac)).

[1381] In another embodiment, the compound of Formula (X) is

[chemical structure]

wherein [symbol] represents a solid support; Q is O or NH, and R^{P}, R^{P3}, and R¹ are as defined for Formula (X) or any embodiment thereof and R^{P}, R¹, L′, ZZ, and L are as defined for Formula (X) or any embodiment thereof.

[1382] In one embodiment, R^{P3} is a hydrogen. In another embodiment, R^{P3} is a hydroxyl protecting group (e.g., DMTr).

[1383] In one embodiment, R¹ is hydrogen. In another embodiment, R¹ is C₁₋₆alkyl (e.g., methyl or t-butyl).

[1384] In one embodiment, R^{P} is hydrogen. In another embodiment, R^{P} is a nitrogen protecting group (e.g., t-butoxycarbonyl (Boc), benzyloxycarbonyl (Cbz) or phenoxyacetyl (pac)).

[1385] In one embodiment, R^{P3} is hydrogen and R¹ is hydrogen. In one embodiment, R^{P3} is hydrogen and R¹ is C₁₋₆alkyl (e.g., methyl or t-butyl). In one embodiment, R^{P3} is a hydroxyl protecting group (e.g., DMTr) and R¹ is hydrogen. In one embodiment, R^{P3} is a hydroxyl protecting group (e.g., DMTr) and R¹ is C₁₋₆alkyl (e.g., methyl ort-butyl).

[1386] In one embodiment, R^{P3} is hydrogen and R^{P} is hydrogen. In one embodiment, R^{P3} is hydrogen and R^{P} is a nitrogen protecting group (e.g., t-butoxycarbonyl (Boc), benzyloxycarbonyl (Cbz) or phenoxyacetyl (pac)). In one embodiment, R^{P3} is a hydroxyl protecting group (e.g., DMTr) and R^{P} is hydrogen. In one embodiment, R^{P3} is a hydroxyl protecting group (e.g., DMTr) and R^{P} is a nitrogen protecting group (e.g., t-butoxycarbonyl (Boc), benzyloxycarbonyl (Cbz) or phenoxyacetyl (pac)).

[1387] In one embodiment, R^{P3} is hydrogen, R¹ is hydrogen and R^{P} is hydrogen. In one embodiment, R^{P3} is a hydroxyl protecting group (e.g., DMTr), R¹ is hydrogen and R^{P} is hydrogen. In one embodiment, R^{P3} is hydrogen, R¹ is hydrogen and R^{P} is a nitrogen protecting group (e.g., t-butoxycarbonyl (Boc), benzyloxycarbonyl (Cbz) or phenoxyacetyl (pac)). In one embodiment, R^{P3} is a hydroxyl protecting group (e.g., DMTr), R¹ is hydrogen and R^{P} is a nitrogen protecting group (e.g., t-butoxycarbonyl (Boc), benzyloxycarbonyl (Cbz) or phenoxyacetyl (pac)). In one embodiment, R^{P3} is hydrogen, R¹ is C₁₋₆alkyl (e.g., methyl or t-butyl) and R^{P} is hydrogen. In one embodiment, R^{P3} is a hydroxyl protecting group (e.g., DMTr), R¹ is C₁₋₆alkyl (e.g., methyl or t-butyl) and R^{P} is hydrogen. In one embodiment, R^{P3} is hydrogen, R¹ is C₁₋₆alkyl (e.g., methyl or t-butyl) and R^{P} is a nitrogen protecting group (e.g., t-butoxycarbonyl (Boc), benzyloxycarbonyl (Cbz) or phenoxyacetyl (pac)). In one embodiment, R^{P3} is a hydroxyl protecting group (e.g., DMTr), R¹ is C₁₋₆alkyl (e.g., methyl or t-butyl) and R^{P} is a nitrogen protecting group (e.g., t-butoxycarbonyl (Boc), benzyloxycarbonyl (Cbz) or phenoxyacetyl (pac)).

[1388] In another embodiment, the compound of Formula (X) is

[chemical structure]

wherein [symbol] represents a solid support; Q is O or NH, and R^{P}, R^{P3}, R¹, L′, ZZ, and L are as defined for Formula (X) or any embodiment thereof.

[1389] In one embodiment, R^{P3} is a hydrogen. In another embodiment, R^{P3} is a hydroxyl protecting group (e.g., DMTr).

[1390] In one embodiment, R¹ is hydrogen. In another embodiment, R¹ is C₁₋₆alkyl (e.g., methyl or t-butyl).

[1391] In one embodiment, R^{P} is hydrogen. In another embodiment, R^{P} is a nitrogen protecting group (e.g., t-butoxycarbonyl (Boc), benzyloxycarbonyl (Cbz) or phenoxyacetyl (pac)).

[1392] In one embodiment, R^{P3} is hydrogen and R¹ is hydrogen. In one embodiment, R^{P3} is hydrogen and R¹ is C₁₋₆alkyl (e.g., methyl or t-butyl). In one embodiment, R^{P3} is a hydroxyl protecting group (e.g., DMTr) and R¹ is hydrogen. In one embodiment, R^{P3} is a hydroxyl protecting group (e.g., DMTr) and R¹ is C₁₋₆alkyl (e.g., methyl ort-butyl).

[1393] In one embodiment, R^{P3} is hydrogen and R^{P} is hydrogen. In one embodiment, R^{P3} is hydrogen and R^{P} is a nitrogen protecting group (e.g., t-butoxycarbonyl (Boc), benzyloxycarbonyl (Cbz) or phenoxyacetyl (pac)). In one embodiment, R^{P3} is a hydroxyl protecting group (e.g., DMTr) and R^{P} is hydrogen. In one embodiment, R^{P3} is a hydroxyl protecting group (e.g., DMTr) and R^{P} is a nitrogen protecting group (e.g., t-butoxycarbonyl (Boc), benzyloxycarbonyl (Cbz) or phenoxyacetyl (pac)).

[1394] In one embodiment, R^{P3} is hydrogen, R¹ is hydrogen and R^{P} is hydrogen. In one embodiment, R^{P3} is a hydroxyl protecting group (e.g., DMTr), R¹ is hydrogen and R^{P} is hydrogen. In one embodiment, R^{P3} is hydrogen, R¹ is hydrogen and R^{P} is a nitrogen protecting group (e.g., t-butoxycarbonyl (Boc), benzyloxycarbonyl (Cbz) or phenoxyacetyl (pac)). In one embodiment, R^{P3} is a hydroxyl protecting group (e.g., DMTr), R¹ is hydrogen and R^{P} is a nitrogen protecting group (e.g., t-butoxycarbonyl (Boc), benzyloxycarbonyl (Cbz) or phenoxyacetyl (pac)). In one embodiment, R^{P3} is hydrogen, R¹ is C₁₋₆alkyl (e.g., methyl or t-butyl) and R^{P} is hydrogen. In one embodiment, R^{P3} is a hydroxyl protecting group (e.g., DMTr), R¹ is C₁₋₆alkyl (e.g., methyl or t-butyl) and R^{P} is hydrogen. In one embodiment, R^{P3} is hydrogen, R¹ is C₁₋₆alkyl (e.g., methyl or t-butyl) and R^{P} is a nitrogen protecting group (e.g., t-butoxycarbonyl (Boc), benzyloxycarbonyl (Cbz) or phenoxyacetyl (pac)). In one embodiment, R^{P3} is a hydroxyl protecting group (e.g., DMTr), R¹ is C₁₋₆alkyl (e.g., methyl or t-butyl) and R^{P} is a nitrogen protecting group (e.g., t-butoxycarbonyl (Boc), benzyloxycarbonyl (Cbz) or phenoxyacetyl (pac)).

[1395] In another embodiment, the compound of Formula (X) is

[chemical structure]

wherein [symbol] represents a solid support; Q is O or NH, and R^{P}, R^{P3}, R¹, L′, and L are as defined for Formula (X) or any embodiment thereof.

[1396] In one embodiment, R^{P3} is a hydrogen. In another embodiment, R^{P3} is a hydroxyl protecting group (e.g., DMTr).

[1397] In one embodiment, R¹ is hydrogen. In another embodiment, R¹ is C₁₋₆alkyl (e.g., methyl or t-butyl).

[1398] In one embodiment, R^{P} is hydrogen. In another embodiment, R^{P} is a nitrogen protecting group (e.g., t-butoxycarbonyl (Boc), benzyloxycarbonyl (Cbz) or phenoxyacetyl (pac)).

[1399] In one embodiment, R^{P3} is hydrogen and R¹ is hydrogen. In one embodiment, R^{P3} is hydrogen and R¹ is C₁₋₆alkyl (e.g., methyl or t-butyl). In one embodiment, R^{P3} is a hydroxyl protecting group (e.g., DMTr) and R¹ is hydrogen. In one embodiment, R^{P3} is a hydroxyl protecting group (e.g., DMTr) and R¹ is C₁₋₆alkyl (e.g., methyl ort-butyl).

[1400] In one embodiment, R^{P3} is hydrogen and R^{P} is hydrogen. In one embodiment, R^{P3} is hydrogen and R^{P} is a nitrogen protecting group (e.g., t-butoxycarbonyl (Boc), benzyloxycarbonyl (Cbz) or phenoxyacetyl (pac)). In one embodiment, R^{P3} is a hydroxyl protecting group (e.g., DMTr) and R^{P} is hydrogen. In one embodiment, R^{P3} is a hydroxyl protecting group (e.g., DMTr) and R^{P} is a nitrogen protecting group (e.g., t-butoxycarbonyl (Boc), benzyloxycarbonyl (Cbz) or phenoxyacetyl (pac)).

[1401] In one embodiment, R^{P3} is hydrogen, R¹ is hydrogen and R^{P} is hydrogen. In one embodiment, R^{P3} is a hydroxyl protecting group (e.g., DMTr), R¹ is hydrogen and R^{P} is hydrogen. In one embodiment, R^{P3} is hydrogen, R¹ is hydrogen and R^{P} is a nitrogen protecting group (e.g., t-butoxycarbonyl (Boc), benzyloxycarbonyl (Cbz) or phenoxyacetyl (pac)). In one embodiment, R^{P3} is a hydroxyl protecting group (e.g., DMTr), R¹ is hydrogen and R^{P} is a nitrogen protecting group (e.g., t-butoxycarbonyl (Boc), benzyloxycarbonyl (Cbz) or phenoxyacetyl (pac)). In one embodiment, R^{P3} is hydrogen, R¹ is C₁₋₆alkyl (e.g., methyl or t-butyl) and R^{P} is hydrogen. In one embodiment, R^{P3} is a hydroxyl protecting group (e.g., DMTr), R¹ is C₁₋₆alkyl (e.g., methyl or t-butyl) and R^{P} is hydrogen. In one embodiment, R^{P3} is hydrogen, R¹ is C₁₋₆alkyl (e.g., methyl or t-butyl) and R^{P} is a nitrogen protecting group (e.g., t-butoxycarbonyl (Boc), benzyloxycarbonyl (Cbz) or phenoxyacetyl (pac)). In one embodiment, R^{P3} is a hydroxyl protecting group (e.g., DMTr), R¹ is C₁₋₆alkyl (e.g., methyl or t-butyl) and R^{P} is a nitrogen protecting group (e.g., t-butoxycarbonyl (Boc), benzyloxycarbonyl (Cbz) or phenoxyacetyl (pac)).

[1402] In another embodiment, the compound of Formula (X) is

[chemical structure]

wherein each m is independently an integer selected from 1-10; [symbol] represents a solid support; Q is O or NH, and R^{P}, R^{P3}, and R¹ are as defined for Formula (X) or any embodiment thereof. In one embodiment, each m is independently an integer selected from 2-10; or 2-8, or 2-6.

[1403] In one embodiment, R^{P3} is a hydrogen. In another embodiment, R^{P3} is a hydroxyl protecting group (e.g., DMTr).

[1404] In one embodiment, R¹ is hydrogen. In another embodiment, R¹ is C₁₋₆alkyl (e.g., methyl or t-butyl).

[1405] In one embodiment, R^{P} is hydrogen. In another embodiment, R^{P} is a nitrogen protecting group (e.g., t-butoxycarbonyl (Boc), benzyloxycarbonyl (Cbz) or phenoxyacetyl (pac)).

[1406] In one embodiment, R^{P3} is hydrogen and R¹ is hydrogen. In one embodiment, R^{P3} is hydrogen and R¹ is C₁₋₆alkyl (e.g., methyl or t-butyl). In one embodiment, R^{P3} is a hydroxyl protecting group (e.g., DMTr) and R¹ is hydrogen. In one embodiment, R^{P3} is a hydroxyl protecting group (e.g., DMTr) and R¹ is C₁₋₆alkyl (e.g., methyl ort-butyl).

[1407] In one embodiment, R^{P3} is hydrogen and R^{P} is hydrogen. In one embodiment, R^{P3} is hydrogen and R^{P} is a nitrogen protecting group (e.g., t-butoxycarbonyl (Boc), benzyloxycarbonyl (Cbz) or phenoxyacetyl (pac)). In one embodiment, R^{P3} is a hydroxyl protecting group (e.g., DMTr) and R^{P} is hydrogen. In one embodiment, R^{P3} is a hydroxyl protecting group (e.g., DMTr) and R^{P} is a nitrogen protecting group (e.g., t-butoxycarbonyl (Boc), benzyloxycarbonyl (Cbz) or phenoxyacetyl (pac)).

[1408] In one embodiment, R^{P3} is hydrogen, R¹ is hydrogen and R^{P} is hydrogen. In one embodiment, R^{P3} is a hydroxyl protecting group (e.g., DMTr), R¹ is hydrogen and R^{P} is hydrogen. In one embodiment, R^{P3} is hydrogen, R¹ is hydrogen and R^{P} is a nitrogen protecting group (e.g., t-butoxycarbonyl (Boc), benzyloxycarbonyl (Cbz) or phenoxyacetyl (pac)). In one embodiment, R^{P3} is a hydroxyl protecting group (e.g., DMTr), R¹ is hydrogen and R^{P} is a nitrogen protecting group (e.g., t-butoxycarbonyl (Boc), benzyloxycarbonyl (Cbz) or phenoxyacetyl (pac)). In one embodiment, R^{P3} is hydrogen, R¹ is C₁₋₆alkyl (e.g., methyl or t-butyl) and R^{P} is hydrogen. In one embodiment, R^{P3} is a hydroxyl protecting group (e.g., DMTr), R¹ is C₁₋₆alkyl (e.g., methyl or t-butyl) and R^{P} is hydrogen. In one embodiment, R^{P3} is hydrogen, R¹ is C₁₋₆alkyl (e.g., methyl or t-butyl) and R^{P} is a nitrogen protecting group (e.g., t-butoxycarbonyl (Boc), benzyloxycarbonyl (Cbz) or phenoxyacetyl (pac)). In one embodiment, R^{P3} is a hydroxyl protecting group (e.g., DMTr), R¹ is C₁₋₆alkyl (e.g., methyl or t-butyl) and R^{P} is a nitrogen protecting group (e.g., t-butoxycarbonyl (Boc), benzyloxycarbonyl (Cbz) or phenoxyacetyl (pac)).

[1409] In another embodiment, the compound of Formula (X) is

[chemical structure]

wherein [symbol] represents a solid support; Q is O or NH, and R^{P}, R^{P3}, and R¹ are as defined for Formula (X) or any embodiment thereof and R^{P}, R¹, L′, ZZ, and L are as defined for Formula (X) or any embodiment thereof.

[1410] In one embodiment, R^{P3} is a hydrogen. In another embodiment, R^{P3} is a hydroxyl protecting group (e.g., DMTr).

[1411] In one embodiment, R¹ is hydrogen. In another embodiment, R¹ is C₁₋₆alkyl (e.g., methyl or t-butyl).

[1412] In one embodiment, R^{P} is hydrogen. In another embodiment, R^{P} is a nitrogen protecting group (e.g., t-butoxycarbonyl (Boc), benzyloxycarbonyl (Cbz) or phenoxyacetyl (pac)).

[1413] In one embodiment, R^{P3} is hydrogen and R¹ is hydrogen. In one embodiment, R^{P3} is hydrogen and R¹ is C₁₋₆alkyl (e.g., methyl or t-butyl). In one embodiment, R^{P3} is a hydroxyl protecting group (e.g., DMTr) and R¹ is hydrogen. In one embodiment, R^{P3} is a hydroxyl protecting group (e.g., DMTr) and R¹ is C₁₋₆alkyl (e.g., methyl ort-butyl).

[1414] In one embodiment, R^{P3} is hydrogen and R^{P} is hydrogen. In one embodiment, R^{P3} is hydrogen and R^{P} is a nitrogen protecting group (e.g., t-butoxycarbonyl (Boc), benzyloxycarbonyl (Cbz) or phenoxyacetyl (pac)). In one embodiment, R^{P3} is a hydroxyl protecting group (e.g., DMTr) and R^{P} is hydrogen. In one embodiment, R^{P3} is a hydroxyl protecting group (e.g., DMTr) and R^{P} is a nitrogen protecting group (e.g., t-butoxycarbonyl (Boc), benzyloxycarbonyl (Cbz) or phenoxyacetyl (pac)).

[1415] In one embodiment, R^{P3} is hydrogen, R¹ is hydrogen and R^{P} is hydrogen. In one embodiment, R^{P3} is a hydroxyl protecting group (e.g., DMTr), R¹ is hydrogen and R^{P} is hydrogen. In one embodiment, R^{P3} is hydrogen, R¹ is hydrogen and R^{P} is a nitrogen protecting group (e.g., t-butoxycarbonyl (Boc), benzyloxycarbonyl (Cbz) or phenoxyacetyl (pac)). In one embodiment, R^{P3} is a hydroxyl protecting group (e.g., DMTr), R¹ is hydrogen and R^{P} is a nitrogen protecting group (e.g., t-butoxycarbonyl (Boc), benzyloxycarbonyl (Cbz) or phenoxyacetyl (pac)). In one embodiment, R^{P3} is hydrogen, R¹ is C₁₋₆alkyl (e.g., methyl or t-butyl) and R^{P} is hydrogen. In one embodiment, R^{P3} is a hydroxyl protecting group (e.g., DMTr), R¹ is C₁₋₆alkyl (e.g., methyl or t-butyl) and R^{P} is hydrogen.

[1416] In one embodiment, R^{P3} is hydrogen, R¹ is C₁₋₆alkyl (e.g., methyl or t-butyl) and R^{P} is a nitrogen protecting group (e.g., t-butoxycarbonyl (Boc), benzyloxycarbonyl (Cbz) or phenoxyacetyl (pac)). In one embodiment, R^{P3} is a hydroxyl protecting group (e.g., DMTr), R¹ is C₁₋₆alkyl (e.g., methyl or t-butyl) and R^{P} is a nitrogen protecting group (e.g., t-butoxycarbonyl (Boc), benzyloxycarbonyl (Cbz) or phenoxyacetyl (pac)).

[1417] In another embodiment, the compound of Formula (X) is

[chemical structure]

wherein [symbol] represents a solid support; Q is O or NH, and R^{P}, R^{P3}, R¹, L′, ZZ, and L are as defined for Formula (X) or any embodiment thereof.

[1418] In one embodiment, R^{P3} is a hydrogen. In another embodiment, R^{P3} is a hydroxyl protecting group (e.g., DMTr).

[1419] In one embodiment, R¹ is hydrogen. In another embodiment, R¹ is C₁₋₆alkyl (e.g., methyl or t-butyl).

[1420] In one embodiment, R^{P} is hydrogen. In another embodiment, R^{P} is a nitrogen protecting group (e.g., t-butoxycarbonyl (Boc), benzyloxycarbonyl (Cbz) or phenoxyacetyl (pac)).

[1421] In one embodiment, R^{P3} is hydrogen and R¹ is hydrogen. In one embodiment, R^{P3} is hydrogen and R¹ is C₁₋₆alkyl (e.g., methyl or t-butyl). In one embodiment, R^{P3} is a hydroxyl protecting group (e.g., DMTr) and R¹ is hydrogen. In one embodiment, R^{P3} is a hydroxyl protecting group (e.g., DMTr) and R¹ is C₁₋₆alkyl (e.g., methyl ort-butyl).

[1422] In one embodiment, R^{P3} is hydrogen and R^{P} is hydrogen. In one embodiment, R^{P3} is hydrogen and R^{P} is a nitrogen protecting group (e.g., t-butoxycarbonyl (Boc), benzyloxycarbonyl (Cbz) or phenoxyacetyl (pac)). In one embodiment, R^{P3} is a hydroxyl protecting group (e.g., DMTr) and R^{P} is hydrogen. In one embodiment, R^{P3} is a hydroxyl protecting group (e.g., DMTr) and R^{P} is a nitrogen protecting group (e.g., t-butoxycarbonyl (Boc), benzyloxycarbonyl (Cbz) or phenoxyacetyl (pac)).

[1423] In one embodiment, R^{P3} is hydrogen, R¹ is hydrogen and R^{P} is hydrogen. In one embodiment, R^{P3} is a hydroxyl protecting group (e.g., DMTr), R¹ is hydrogen and R^{P} is hydrogen. In one embodiment, R^{P3} is hydrogen, R¹ is hydrogen and R^{P} is a nitrogen protecting group (e.g., t-butoxycarbonyl (Boc), benzyloxycarbonyl (Cbz) or phenoxyacetyl (pac)). In one embodiment, R^{P3} is a hydroxyl protecting group (e.g., DMTr), R¹ is hydrogen and R^{P} is a nitrogen protecting group (e.g., t-butoxycarbonyl (Boc), benzyloxycarbonyl (Cbz) or phenoxyacetyl (pac)). In one embodiment, R^{P3} is hydrogen, R¹ is C₁₋₆alkyl (e.g., methyl or t-butyl) and R^{P} is hydrogen. In one embodiment, R^{P3} is a hydroxyl protecting group (e.g., DMTr), R¹ is C₁₋₆alkyl (e.g., methyl or t-butyl) and R^{P} is hydrogen.

[1424] In one embodiment, R^{P3} is hydrogen, R¹ is C₁₋₆alkyl (e.g., methyl or t-butyl) and R^{P} is a nitrogen protecting group (e.g., t-butoxycarbonyl (Boc), benzyloxycarbonyl (Cbz) or phenoxyacetyl (pac)). In one embodiment, R^{P3} is a hydroxyl protecting group (e.g., DMTr), R¹ is C₁₋₆alkyl (e.g., methyl or t-butyl) and R^{P} is a nitrogen protecting group (e.g., t-butoxycarbonyl (Boc), benzyloxycarbonyl (Cbz) or phenoxyacetyl (pac)).

[1425] In another embodiment, the compound of Formula (X) is

[chemical structure]

wherein [symbol] represents a solid support; Q is O or NH, and R^{P}, R^{P3}, R¹, L′, and L are as defined for Formula (X) or any embodiment thereof.

[1426] In one embodiment, R^{P3} is a hydrogen. In another embodiment, R^{P3} is a hydroxyl protecting group (e.g., DMTr).

[1427] In one embodiment, R¹ is hydrogen. In another embodiment, R¹ is C₁₋₆alkyl (e.g., methyl or t-butyl).

[1428] In one embodiment, R^{P} is hydrogen. In another embodiment, R^{P} is a nitrogen protecting group (e.g., t-butoxycarbonyl (Boc), benzyloxycarbonyl (Cbz) or phenoxyacetyl (pac)).

[1429] In one embodiment, R^{P3} is hydrogen and R¹ is hydrogen. In one embodiment, R^{P3} is hydrogen and R¹ is C₁₋₆alkyl (e.g., methyl or t-butyl). In one embodiment, R^{P3} is a hydroxyl protecting group (e.g., DMTr) and R¹ is hydrogen. In one embodiment, R^{P3} is a hydroxyl protecting group (e.g., DMTr) and R¹ is C₁₋₆alkyl (e.g., methyl ort-butyl).

[1430] In one embodiment, R^{P3} is hydrogen and R^{P} is hydrogen. In one embodiment, R^{P3} is hydrogen and R^{P} is a nitrogen protecting group (e.g., t-butoxycarbonyl (Boc), benzyloxycarbonyl (Cbz) or phenoxyacetyl (pac)). In one embodiment, R^{P3} is a hydroxyl protecting group (e.g., DMTr) and R^{P} is hydrogen. In one embodiment, R^{P3} is a hydroxyl protecting group (e.g., DMTr) and R^{P} is a nitrogen protecting group (e.g., t-butoxycarbonyl (Boc), benzyloxycarbonyl (Cbz) or phenoxyacetyl (pac)).

[1431] In one embodiment, R^{P3} is hydrogen, R¹ is hydrogen and R^{P} is hydrogen. In one embodiment, R^{P3} is a hydroxyl protecting group (e.g., DMTr), R¹ is hydrogen and R^{P} is hydrogen. In one embodiment, R^{P3} is hydrogen, R¹ is hydrogen and R^{P} is a nitrogen protecting group (e.g., t-butoxycarbonyl (Boc), benzyloxycarbonyl (Cbz) or phenoxyacetyl (pac)). In one embodiment, R^{P3} is a hydroxyl protecting group (e.g., DMTr), R¹ is hydrogen and R^{P} is a nitrogen protecting group (e.g., t-butoxycarbonyl (Boc), benzyloxycarbonyl (Cbz) or phenoxyacetyl (pac)). In one embodiment, R^{P3} is hydrogen, R¹ is C₁₋₆alkyl (e.g., methyl or t-butyl) and R^{P} is hydrogen. In one embodiment, R^{P3} is a hydroxyl protecting group (e.g., DMTr), R¹ is C₁₋₆alkyl (e.g., methyl or t-butyl) and R^{P} is hydrogen. In one embodiment, R^{P3} is hydrogen, R¹ is C₁₋₆alkyl (e.g., methyl or t-butyl) and R^{P} is a nitrogen protecting group (e.g., t-butoxycarbonyl (Boc), benzyloxycarbonyl (Cbz) or phenoxyacetyl (pac)). In one embodiment, R^{P3} is a hydroxyl protecting group (e.g., DMTr), R¹ is C₁₋₆alkyl (e.g., methyl or t-butyl) and R^{P} is a nitrogen protecting group (e.g., t-butoxycarbonyl (Boc), benzyloxycarbonyl (Cbz) or phenoxyacetyl (pac)).

[1432] In another embodiment, the compound of Formula (X) is

[chemical structure]

wherein each m is independently an integer selected from 1-10; [symbol] represents a solid support; Q is O or NH, and R^{P}, R^{P3}, and R¹ are as defined for Formula (X) or any embodiment thereof. In one embodiment, each m is independently an integer selected from 2-10; or 2-8, or 2-6.

[1433] In one embodiment, R^{P3} is a hydrogen. In another embodiment, R^{P3} is a hydroxyl protecting group (e.g., DMTr).

[1434] In one embodiment, R¹ is hydrogen. In another embodiment, R¹ is C₁₋₆alkyl (e.g., methyl or t-butyl).

[1435] In one embodiment, R^{P} is hydrogen. In another embodiment, R^{P} is a nitrogen protecting group (e.g., t-butoxycarbonyl (Boc), benzyloxycarbonyl (Cbz) or phenoxyacetyl (pac)).

[1436] In one embodiment, R^{P3} is hydrogen and R¹ is hydrogen. In one embodiment, R^{P3} is hydrogen and R¹ is C₁₋₆alkyl (e.g., methyl or t-butyl). In one embodiment, R^{P3} is a hydroxyl protecting group (e.g., DMTr) and R¹ is hydrogen. In one embodiment, R^{P3} is a hydroxyl protecting group (e.g., DMTr) and R¹ is C₁₋₆alkyl (e.g., methyl ort-butyl).

[1437] In one embodiment, R^{P3} is hydrogen and R^{P} is hydrogen. In one embodiment, R^{P3} is hydrogen and R^{P} is a nitrogen protecting group (e.g., t-butoxycarbonyl (Boc), benzyloxycarbonyl (Cbz) or phenoxyacetyl (pac)). In one embodiment, R^{P3} is a hydroxyl protecting group (e.g., DMTr) and R^{P} is hydrogen. In one embodiment, R^{P3} is a hydroxyl protecting group (e.g., DMTr) and R^{P} is a nitrogen protecting group (e.g., t-butoxycarbonyl (Boc), benzyloxycarbonyl (Cbz) or phenoxyacetyl (pac)).

[1438] In one embodiment, R^{P3} is hydrogen, R¹ is hydrogen and R^{P} is hydrogen. In one embodiment, R^{P3} is a hydroxyl protecting group (e.g., DMTr), R¹ is hydrogen and R^{P} is hydrogen. In one embodiment, R^{P3} is hydrogen, R¹ is hydrogen and R^{P} is a nitrogen protecting group (e.g., t-butoxycarbonyl (Boc), benzyloxycarbonyl (Cbz) or phenoxyacetyl (pac)). In one embodiment, R^{P3} is a hydroxyl protecting group (e.g., DMTr), R¹ is hydrogen and R^{P} is a nitrogen protecting group (e.g., t-butoxycarbonyl (Boc), benzyloxycarbonyl (Cbz) or phenoxyacetyl (pac)). In one embodiment, R^{P3} is hydrogen, R¹ is C₁₋₆alkyl (e.g., methyl or t-butyl) and R^{P} is hydrogen. In one embodiment, R^{P3} is a hydroxyl protecting group (e.g., DMTr), R¹ is C₁₋₆alkyl (e.g., methyl or t-butyl) and R^{P} is hydrogen. In one embodiment, R^{P3} is hydrogen, R¹ is C₁₋₆alkyl (e.g., methyl or t-butyl) and R^{P} is a nitrogen protecting group (e.g., t-butoxycarbonyl (Boc), benzyloxycarbonyl (Cbz) or phenoxyacetyl (pac)). In one embodiment, R^{P3} is a hydroxyl protecting group (e.g., DMTr), R¹ is C₁₋₆alkyl (e.g., methyl or t-butyl) and R^{P} is a nitrogen protecting group (e.g., t-butoxycarbonyl (Boc), benzyloxycarbonyl (Cbz) or phenoxyacetyl (pac)).

[1439] In another embodiment, the compound of Formula (X) is

[chemical structure]

wherein [symbol] represents a solid support; Q is O or NH, and R^{P}, R^{P3}, and Rare as defined for Formula (X) or any embodiment thereof and R^{P}, R¹, L′, ZZ, and L are as defined for Formula (X) or any embodiment thereof.

[1440] In one embodiment, R^{P3} is a hydrogen. In another embodiment, R^{P3} is a hydroxyl protecting group (e.g., DMTr).

[1441] In one embodiment, R¹ is hydrogen. In another embodiment, R¹ is C₁₋₆alkyl (e.g., methyl or t-butyl).

[1442] In one embodiment, R^{P} is hydrogen. In another embodiment, R^{P} is a nitrogen protecting group (e.g., t-butoxycarbonyl (Boc), benzyloxycarbonyl (Cbz) or phenoxyacetyl (pac)).

[1443] In one embodiment, R^{P3} is hydrogen and R¹ is hydrogen. In one embodiment, R^{P3} is hydrogen and R¹ is C₁₋₆alkyl (e.g., methyl or t-butyl). In one embodiment, R^{P3} is a hydroxyl protecting group (e.g., DMTr) and R¹ is hydrogen. In one embodiment, R^{P3} is a hydroxyl protecting group (e.g., DMTr) and R¹ is C₁₋₆alkyl (e.g., methyl ort-butyl).

[1444] In one embodiment, R^{P3} is hydrogen and R^{P} is hydrogen. In one embodiment, R^{P3} is hydrogen and R^{P} is a nitrogen protecting group (e.g., t-butoxycarbonyl (Boc), benzyloxycarbonyl (Cbz) or phenoxyacetyl (pac)). In one embodiment, R^{P3} is a hydroxyl protecting group (e.g., DMTr) and R^{P} is hydrogen. In one embodiment, R^{P3} is a hydroxyl protecting group (e.g., DMTr) and R^{P} is a nitrogen protecting group (e.g., t-butoxycarbonyl (Boc), benzyloxycarbonyl (Cbz) or phenoxyacetyl (pac)).

[1445] In one embodiment, R^{P3} is hydrogen, R¹ is hydrogen and R^{P} is hydrogen. In one embodiment, R^{P3} is a hydroxyl protecting group (e.g., DMTr), R¹ is hydrogen and R^{P} is hydrogen. In one embodiment, R^{P3} is hydrogen, R¹ is hydrogen and R^{P} is a nitrogen protecting group (e.g., t-butoxycarbonyl (Boc), benzyloxycarbonyl (Cbz) or phenoxyacetyl (pac)). In one embodiment, R^{P3} is a hydroxyl protecting group (e.g., DMTr), R¹ is hydrogen and R^{P} is a nitrogen protecting group (e.g., t-butoxycarbonyl (Boc), benzyloxycarbonyl (Cbz) or phenoxyacetyl (pac)). In one embodiment, R^{P3} is hydrogen, R¹ is C₁₋₆alkyl (e.g., methyl or t-butyl) and R^{P} is hydrogen. In one embodiment, R^{P3} is a hydroxyl protecting group (e.g., DMTr), R¹ is C₁₋₆alkyl (e.g., methyl or t-butyl) and R^{P} is hydrogen.

[1446] In one embodiment, R^{P3} is hydrogen, R¹ is C₁₋₆alkyl (e.g., methyl or t-butyl) and R^{P} is a nitrogen protecting group (e.g., t-butoxycarbonyl (Boc), benzyloxycarbonyl (Cbz) or phenoxyacetyl (pac)). In one embodiment, R^{P3} is a hydroxyl protecting group (e.g., DMTr), R¹ is C₁₋₆alkyl (e.g., methyl or t-butyl) and R^{P} is a nitrogen protecting group (e.g., t-butoxycarbonyl (Boc), benzyloxycarbonyl (Cbz) or phenoxyacetyl (pac)).

[1447] In another embodiment, the compound of Formula (X) is

[chemical structure]

wherein [symbol] represents a solid support; Q is O or NH, and R¹, R^{P}, R^{P3}, R¹, L′, ZZ, and L are as defined for Formula (X) or any embodiment thereof.

[1448] In one embodiment, R^{P3} is a hydrogen. In another embodiment, R^{P3} is a hydroxyl protecting group (e.g., DMTr).

[1449] In one embodiment, R¹ is hydrogen. In another embodiment, R¹ is C₁₋₆alkyl (e.g., methyl or t-butyl).

[1450] In one embodiment, R^{P} is hydrogen. In another embodiment, R^{P} is a nitrogen protecting group (e.g., t-butoxycarbonyl (Boc), benzyloxycarbonyl (Cbz) or phenoxyacetyl (pac)).

[1451] In one embodiment, R^{P3} is hydrogen and R¹ is hydrogen. In one embodiment, R^{P3} is hydrogen and R¹ is C₁₋₆alkyl (e.g., methyl or t-butyl). In one embodiment, R^{P3} is a hydroxyl protecting group (e.g., DMTr) and R¹ is hydrogen. In one embodiment, R^{P3} is a hydroxyl protecting group (e.g., DMTr) and R¹ is C₁₋₆alkyl (e.g., methyl ort-butyl).

[1452] In one embodiment, R^{P3} is hydrogen and R^{P} is hydrogen. In one embodiment, R^{P3} is hydrogen and R^{P} is a nitrogen protecting group (e.g., t-butoxycarbonyl (Boc), benzyloxycarbonyl (Cbz) or phenoxyacetyl (pac)). In one embodiment, R^{P3} is a hydroxyl protecting group (e.g., DMTr) and R^{P} is hydrogen. In one embodiment, R^{P3} is a hydroxyl protecting group (e.g., DMTr) and R^{P} is a nitrogen protecting group (e.g., t-butoxycarbonyl (Boc), benzyloxycarbonyl (Cbz) or phenoxyacetyl (pac)).

[1453] In one embodiment, R^{P3} is hydrogen, R¹ is hydrogen and R^{P} is hydrogen. In one embodiment, R^{P3} is a hydroxyl protecting group (e.g., DMTr), R¹ is hydrogen and R^{P} is hydrogen. In one embodiment, R^{P3} is hydrogen, R¹ is hydrogen and R^{P} is a nitrogen protecting group (e.g., t-butoxycarbonyl (Boc), benzyloxycarbonyl (Cbz) or phenoxyacetyl (pac)). In one embodiment, R^{P3} is a hydroxyl protecting group (e.g., DMTr), R¹ is hydrogen and R^{P} is a nitrogen protecting group (e.g., t-butoxycarbonyl (Boc), benzyloxycarbonyl (Cbz) or phenoxyacetyl (pac)). In one embodiment, R^{P3} is hydrogen, R¹ is C₁₋₆alkyl (e.g., methyl or t-butyl) and R^{P} is hydrogen. In one embodiment, R^{P3} is a hydroxyl protecting group (e.g., DMTr), R¹ is C₁₋₆alkyl (e.g., methyl or t-butyl) and R^{P} is hydrogen. In one embodiment, R^{P3} is hydrogen, R¹ is C₁₋₆alkyl (e.g., methyl or t-butyl) and R^{P} is a nitrogen protecting group (e.g., t-butoxycarbonyl (Boc), benzyloxycarbonyl (Cbz) or phenoxyacetyl (pac)). In one embodiment, R^{P3} is a hydroxyl protecting group (e.g., DMTr), R¹ is C₁₋₆alkyl (e.g., methyl or t-butyl) and R^{P} is a nitrogen protecting group (e.g., t-butoxycarbonyl (Boc), benzyloxycarbonyl (Cbz) or phenoxyacetyl (pac)).

[1454] In another embodiment, the compound of Formula (X) is

[chemical structure]

wherein [symbol] represents a solid support; Q is O or NH, and R^{P}, R^{P3}, R¹, L′, and L are as defined for Formula (X) or any embodiment thereof.

[1455] In one embodiment, R^{P3} is a hydrogen. In another embodiment, R^{P3} is a hydroxyl protecting group (e.g., DMTr).

[1456] In one embodiment, R¹ is hydrogen. In another embodiment, R¹ is C₁₋₆alkyl (e.g., methyl or t-butyl).

[1457] In one embodiment, R^{P} is hydrogen. In another embodiment, R^{P} is a nitrogen protecting group (e.g., t-butoxycarbonyl (Boc), benzyloxycarbonyl (Cbz) or phenoxyacetyl (pac)).

[1458] In one embodiment, R^{P3} is hydrogen and R¹ is hydrogen. In one embodiment, R^{P3} is hydrogen and R¹ is C₁₋₆alkyl (e.g., methyl or t-butyl). In one embodiment, R^{P3} is a hydroxyl protecting group (e.g., DMTr) and R¹ is hydrogen. In one embodiment, R^{P3} is a hydroxyl protecting group (e.g., DMTr) and R¹ is C₁₋₆alkyl (e.g., methyl ort-butyl).

[1459] In one embodiment, R^{P3} is hydrogen and R^{P} is hydrogen. In one embodiment, R^{P3} is hydrogen and R^{P} is a nitrogen protecting group (e.g., t-butoxycarbonyl (Boc), benzyloxycarbonyl (Cbz) or phenoxyacetyl (pac)). In one embodiment, R^{P3} is a hydroxyl protecting group (e.g., DMTr) and R^{P} is hydrogen. In one embodiment, R^{P3} is a hydroxyl protecting group (e.g., DMTr) and R^{P} is a nitrogen protecting group (e.g., t-butoxycarbonyl (Boc), benzyloxycarbonyl (Cbz) or phenoxyacetyl (pac)).

[1460] In one embodiment, R^{P3} is hydrogen, R¹ is hydrogen and R^{P} is hydrogen. In one embodiment, R^{P3} is a hydroxyl protecting group (e.g., DMTr), R¹ is hydrogen and R^{P} is hydrogen. In one embodiment, R^{P3} is hydrogen, R¹ is hydrogen and R^{P} is a nitrogen protecting group (e.g., t-butoxycarbonyl (Boc), benzyloxycarbonyl (Cbz) or phenoxyacetyl (pac)). In one embodiment, R^{P3} is a hydroxyl protecting group (e.g., DMTr), R¹ is hydrogen and R^{P} is a nitrogen protecting group (e.g., t-butoxycarbonyl (Boc), benzyloxycarbonyl (Cbz) or phenoxyacetyl (pac)). In one embodiment, R^{P3} is hydrogen, R¹ is C₁₋₆alkyl (e.g., methyl or t-butyl) and R^{P} is hydrogen. In one embodiment, R^{P3} is a hydroxyl protecting group (e.g., DMTr), R¹ is C₁₋₆alkyl (e.g., methyl or t-butyl) and R^{P} is hydrogen. In one embodiment, R^{P3} is hydrogen, R¹ is C₁₋₆alkyl (e.g., methyl or t-butyl) and R^{P} is a nitrogen protecting group (e.g., t-butoxycarbonyl (Boc), benzyloxycarbonyl (Cbz) or phenoxyacetyl (pac)). In one embodiment, R^{P3} is a hydroxyl protecting group (e.g., DMTr), R¹ is C₁₋₆alkyl (e.g., methyl or t-butyl) and R^{P} is a nitrogen protecting group (e.g., t-butoxycarbonyl (Boc), benzyloxycarbonyl (Cbz) or phenoxyacetyl (pac)).

[1461] In another embodiment, the compound of Formula (X) is

[chemical structure]

wherein each m is independently an integer selected from 1-10; [symbol] represents a solid support; Q is O or NH, and R^{P}, R^{P3}, and R¹ are as defined for Formula (X) or any embodiment thereof. In one embodiment, each m is independently an integer selected from 2-10; or 2-8, or 2-6.

[1462] In one embodiment, R^{P3} is a hydrogen. In another embodiment, R^{P3} is a hydroxyl protecting group (e.g., DMTr).

[1463] In one embodiment, R¹ is hydrogen. In another embodiment, R¹ is C₁₋₆alkyl (e.g., methyl or t-butyl).

[1464] In one embodiment, R^{P} is hydrogen. In another embodiment, R^{P} is a nitrogen protecting group (e.g., t-butoxycarbonyl (Boc), benzyloxycarbonyl (Cbz) or phenoxyacetyl (pac)).

[1465] In one embodiment, R^{P3} is hydrogen and R¹ is hydrogen. In one embodiment, R^{P3} is hydrogen and R¹ is C₁₋₆alkyl (e.g., methyl or t-butyl). In one embodiment, R^{P3} is a hydroxyl protecting group (e.g., DMTr) and R¹ is hydrogen. In one embodiment, R^{P3} is a hydroxyl protecting group (e.g., DMTr) and R¹ is C₁₋₆alkyl (e.g., methyl ort-butyl).

[1466] In one embodiment, R^{P3} is hydrogen and R^{P} is hydrogen. In one embodiment, R^{P3} is hydrogen and R^{P} is a nitrogen protecting group (e.g., t-butoxycarbonyl (Boc), benzyloxycarbonyl (Cbz) or phenoxyacetyl (pac)). In one embodiment, R^{P3} is a hydroxyl protecting group (e.g., DMTr) and R^{P} is hydrogen. In one embodiment, R^{P3} is a hydroxyl protecting group (e.g., DMTr) and R^{P} is a nitrogen protecting group (e.g., t-butoxycarbonyl (Boc), benzyloxycarbonyl (Cbz) or phenoxyacetyl (pac)).

[1467] In one embodiment, R^{P3} is hydrogen, R¹ is hydrogen and R^{P} is hydrogen. In one embodiment, R^{P3} is a hydroxyl protecting group (e.g., DMTr), R¹ is hydrogen and R^{P} is hydrogen. In one embodiment, R^{P3} is hydrogen, R¹ is hydrogen and R^{P} is a nitrogen protecting group (e.g., t-butoxycarbonyl (Boc), benzyloxycarbonyl (Cbz) or phenoxyacetyl (pac)). In one embodiment, R^{P3} is a hydroxyl protecting group (e.g., DMTr), R¹ is hydrogen and R^{P} is a nitrogen protecting group (e.g., t-butoxycarbonyl (Boc), benzyloxycarbonyl (Cbz) or phenoxyacetyl (pac)). In one embodiment, R^{P3} is hydrogen, R¹ is C₁₋₆alkyl (e.g., methyl or t-butyl) and R^{P} is hydrogen. In one embodiment, R^{P3} is a hydroxyl protecting group (e.g., DMTr), R¹ is C₁₋₆alkyl (e.g., methyl or t-butyl) and R^{P} is hydrogen.

[1468] In one embodiment, R^{P3} is hydrogen, R¹ is C₁₋₆alkyl (e.g., methyl or t-butyl) and R^{P} is a nitrogen protecting group (e.g., t-butoxycarbonyl (Boc), benzyloxycarbonyl (Cbz) or phenoxyacetyl (pac)). In one embodiment, R^{P3} is a hydroxyl protecting group (e.g., DMTr), R¹ is C₁₋₆alkyl (e.g., methyl or t-butyl) and R^{P} is a nitrogen protecting group (e.g., t-butoxycarbonyl (Boc), benzyloxycarbonyl (Cbz) or phenoxyacetyl (pac)).

[1469] In another embodiment, the compound of Formula (X) is

[chemical structure]

### ZZ Embodiments, Formula (X)

[1470] In embodiments of Formula (X), Formula (X-a) through (X-w), including embodiments of Formulae (x-a) through (x-s) and (xi-a) through (xi-m) ZZ is a linking group formed by a reactive pair. In some embodiments, ZZ comprises a group selected from the group consisting of

[chemical structure]

[chemical structure]

[1471] In some embodiments, ZZ comprises Group(1). In some embodiments, ZZ comprises Group(2). In some embodiments, ZZ comprises Group(3). In some embodiments, ZZ comprises Group(4). In some embodiments, ZZ comprises Group(5). In some embodiments, ZZ comprises Group(6). In some embodiments, ZZ comprises Group(7). In some embodiments, ZZ comprises Group(8). In some embodiments, ZZ comprises Group(9). In some embodiments, ZZ comprises Group(10). In some embodiments, ZZ comprises Group(11). In some embodiments, ZZ comprises Group(12).

[1472] In some embodiments, wherein ZZ is -A′-B′-A′-.

[1473] In some embodiments, ZZ is -A′-B′-A′-, wherein
[1474] each A′ is independently a bond, —O—, —S—, or —N(R^{N3})—, wherein R^{N3} is independently hydrogen or C₁₋₆alkyl and
[1475] each B′ is independently CH₂, C(O), C(S), S(O)₂, P(O)(OH), or P(S)(OH).

[1476] In some embodiments, ZZ is CH₂, C(O), C(S), S(O)₂, P(O)(OH), or P(S)(OH).

[1477] In some embodiments, ZZ is C(O), C(S), or S(O)₂.

[1478] In some embodiments, ZZ is P(O)(OH), or P(S)(OH).

[1479] In some embodiments, ZZ is —C(O)—.

[1480] In some embodiments, ZZ is -A′-B′- or -B′-A′- wherein
[1481] each A′ is independently —O—, —S—, or —N(R^{N3})—;
[1482] each B′ is independently CH₂, C(O), C(S), S(O)₂, P(O)(OH), or P(S)(OH); and
[1483] each R^{N3} is independently hydrogen or C₁₋₆alkyl.

[1484] In some embodiments, ZZ is -A′-B′- or -B′-A′- wherein
[1485] each A′ is independently —O— or —N(R^{N3})—, wherein R^{N3} is independently hydrogen or C₁₋₆ alkyl.
[1486] each B′ is independently CH₂, C(O), S(O)₂, P(O)(OH), or P(S)(OH); and
[1487] each R^{N3} is independently hydrogen or C₁₋₆alkyl.

[1488] In some embodiments, ZZ is —CH₂O—, —OCH₂—, —S—S—, —C═N—, —C═N—O—, —C═N—N(R^{N3}), —N═C—, —O—N═C—, —N(R^{N3})—N═C—, —C(O)N(R^{N3})—, —N(R^{N3})C(O)—, —C(O)O—, —OC(O)—, —OC(O)N(R^{N3}), —N(R^{N3})C(O)O—, —N(R^{N3})C(O)N(R^{N3})—, —S(O)₂N(R^{N3})—, —N(R^{N3})S(O)₂—, —OP(O)(OH)O—, —OP(S)(OH)O—, —OP(O)(OH)—, —OP(S)(OH)—, —P(O)(OH)O—, or —P(S)(OH)O—. wherein R^{N3} is independently hydrogen or C₁₋₆alkyl.

[1489] In some embodiments, ZZ is —CH₂O— or —OCH₂—.

[1490] In some embodiments, ZZ is —S—S—.

[1491] In some embodiments, ZZ is —C═N—, —C═N—O—, —C═N—N(R^{N3})—, —N═C—, —O—N═C—, or —N(R^{N3})—N═C—, wherein R^{N3} is independently hydrogen or C₁₋₆alkyl.

[1492] In some embodiments, ZZ is —C(O)N(R^{N3})—, —N(R^{N3})C(O)—, —C(O)O—, —OC(O)—, —OC(O)N(R^{N3})—, —N(R^{N3})C(O)O—, —N(R^{N3})C(O)N(R^{N3})—, —S(O)₂N(R^{N3})—, or —N(R^{N3})S(O)₂—, wherein R^{N3} is independently hydrogen or C₁₋₆alkyl.

[1493] In some embodiments, ZZ is —C(O)N(R^{N3})— or —N(R^{N3})C(O)—, wherein R^{N3} is independently hydrogen or C₁₋₆alkyl.

[1494] In some embodiments, ZZ is —C(O)O— or —OC(O)—.

[1495] In some embodiments, ZZ is —OC(O)N(R^{N3})—, —N(R^{N3})C(O)O—, or —N(R^{N3})C(O)N(R^{N3})—, wherein R^{N3} is independently hydrogen or C₁₋₆alkyl.

[1496] In some embodiments, ZZ is —N(R^{N3})C(O)N(R^{N3})—, wherein R^{N3} is independently hydrogen or C₁₋₆alkyl.

[1497] In some embodiments, ZZ is —OC(O)N(R^{N3})— or —N(R^{N3})C(O)O—, wherein R^{N3} is independently hydrogen or C₁₋₆alkyl.

[1498] In some embodiments, ZZ is —OP(O)(OH)O—, —OP(S)(OH)O—, —OP(O)(OH)—, —OP(S)(OH)—, —P(O)(OH)O—, or —P(S)(OH)O—.

[1499] In some embodiments, ZZ is —OP(O)(OH)O— or —OP(S)(OH)O—.

[1500] In some embodiments, ZZ is —OP(S)(OH)O—.

[1501] In some embodiments, ZZ is —OP(O)(OH)O—.

[1502] In some embodiments, ZZ is —OP(O)(OH)—, —OP(S)(OH)—, —P(O)(OH)O—, or —P(S)(OH)O—.

[1503] In some embodiments, ZZ is —OP(S)(OH)— or —P(S)(OH)O—.

[1504] In some embodiments, ZZ is —OP(O)(OH)— or —P(O)(OH)O—.

### Species of Formula (X)

[1505] In another embodiment, the compound of Formula (X) is selected from the group consisting of,

[chemical structure]

(S)-3-(3-(3,5-dimethyl-1H-pyrazol-1-yl)-5-(4-(5-((6-((2S,4R)-4-hydroxy-2-(hydroxymethyl)pyrrolidin-
1-yl)-6-oxohexyl)amino)-5-oxopentanoyl)piperazin-1-yl)phenyl)-4-((R)-3-(2-(5,6,7,8-tetrahydro-1,8-
naphthyridin-2-yl)ethyl)pyrrolidin-1-yl)butanoic acid;

[chemical structure]

(R)-3-(3-(3,5-dimethyl-1H-pyrazol-1-yl)-5-(4-(5-((6-((2S,4R)-4-hydroxy-2-(hydroxymethyl)pyrrolidin-
1-yl)-6-oxohexyl)amino)-5-oxopentanoyl)piperazin-1-yl)phenyl)-4-((R)-3-(2-(5,6,7,8-tetrahydro-1,8-
naphthyridin-2-yl)ethyl)pyrrolidin-1-yl)butanoic acid;

[chemical structure]

(S)-3-(3-(3,5-dimethyl-1H-pyrazol-1-yl)-5-(4-(5-((6-((6-((2S,4R)-4-hydroxy-2-
(hydroxymethyl)pyrrolidin-1-yl)-6-oxohexyl)amino)-6-oxohexyl)amino)-5-oxopentanoyl)piperazin-1-
yl)phenyl)-4-((R)-3-(2-(5,6,7,8-tetrahydro-1,8-naphthyridin-2-yl)ethyl)pyrrolidin-1-yl)butanoic acid;

[chemical structure]

(S)-3-(3-(3,5-dimethyl-1H-pyrazol-1-yl)-5-(4-(5-((6-((6-((6-((2S,4R)-4-hydroxy-2-
(hydroxymethyl)pyrrolidin-1-yl)-6-oxohexyl)amino)-6-oxohexyl)amino)-6-oxohexyl)amino)-5-
oxopentanoyl)piperazin-1-yl)phenyl)-4-((R)-3-(2-(5,6,7,8-tetrahydro-1,8-naphthyridin-2-
yl)ethyl)pyrrolidin-1-yl)butanoic acid;

[chemical structure]

methyl (S)-3-(3-(4-(5-((6-((2S,4R)-2-((bis(4-methoxyphenyl)(phenyl)methoxy)methyl)-4-
hydroxypyrrolidin-1-yl)-6-oxohexyl)amino)-5-oxopentanoyl)piperazin-1-yl)-5-(3,5-dimethyl-1H-
pyrazol-1-yl)phenyl)-4-((R)-3-(2-(5,6,7,8-tetrahydro-1,8-naphthyridin-2-yl)ethyl)pyrrolidin-1-
yl)butanoate;

[chemical structure]

methyl (R)-3-(3-(4-(5-((6-((2S,4R)-2-((bis(4-methoxyphenyl)(phenyl)methoxy)methyl)-4-
hydroxypyrrolidin-1-yl)-6-oxohexyl)amino)-5-oxopentanoyl)piperazin-1-yl)-5-(3,5-dimethyl-1H-
pyrazol-1-yl)phenyl)-4-((R)-3-(2-(5,6,7,8-tetrahydro-1,8-naphthyridin-2-yl)ethyl)pyrrolidin-1-
yl)butanoate

[chemical structure]

methyl (S)-3-(3-(4-(5-((6-((6-((2S,4R)-2-((bis(4-methoxyphenyl)(phenyl)methoxy)methyl)-4-
hydroxypyrrolidin-1-yl)-6-oxohexyl)amino)-6-oxohexyl)amino)-5-oxopentanoyl)piperazin-1-yl)-5-(3,5-
dimethyl-1H-pyrazol-1-yl)phenyl)-4-((R)-3-(2-(5,6,7,8-tetrahydro-1,8-naphthyridin-2-
yl)ethyl)pyrrolidin-1-yl)butanoate;

[chemical structure]

methyl (S)-3-(3-(4-(5-((6-((6-((6-((2S,4R)-2-((bis(4-methoxyphenyl)(phenyl)methoxy)methyl)-4-
hydroxypyrrolidin-1-yl)-6-oxohexyl)amino)-6-oxohexyl)amino)-6-oxohexyl)amino)-5-
oxopentanoyl)piperazin-1-yl)-5-(3,5-dimethyl-1H-pyrazol-1-yl)phenyl)-4-((R)-3-(2-(5,6,7,8-tetrahydro-
1,8-naphthyridin-2-yl)ethyl)pyrrolidin-1-yl)butanoate;

[chemical structure]

methyl (S)-3-(3-(4-(5-((6-((2S,4R)-2-((bis(4-methoxyphenyl)(phenyl)methoxy)methyl)-4-
hydroxypyrrolidin-1-yl)-6-oxohexyl)amino)-5-oxopentanoyl)piperazin-1-yl)-5-(3,5-dimethyl-1H-
pyrazol-1-yl)phenyl)-4-((R)-3-(2-(8-(2-phenoxyacetyl)-5,6,7,8-tetrahydro-1,8-naphthyridin-2-
yl)ethyl)pyrrolidin-1-yl)butanoate;

[chemical structure]

methyl (R)-3-(3-(4-(5-((6-((2S,4R)-2-((bis(4-methoxyphenyl)(phenyl)methoxy)methyl)-4-
hydroxypyrrolidin-1-yl)-6-oxohexyl)amino)-5-oxopentanoyl)piperazin-1-yl)-5-(3,5-dimethyl-1H-
pyrazol-1-yl)phenyl)-4-((R)-3-(2-(8-(2-phenoxyacetyl)-5,6,7,8-tetrahydro-1,8-naphthyridin-2-
yl)ethyl)pyrrolidin-1-yl)butanoate;

[chemical structure]

methyl (S)-3-(3-(4-(5-((6-((6-((2S,4R)-2-((bis(4-methoxyphenyl)(phenyl)methoxy)methyl)-4-
hydroxypyrrolidin-1-yl)-6-oxohexyl)amino)-6-oxohexyl)amino)-5-oxopentanoyl)piperazin-1-yl)-5-(3,5-
dimethyl-1H-pyrazol-1-yl)phenyl)-4-((R)-3-(2-(8-(2-phenoxyacetyl)-5,6,7,8-tetrahydro-1,8-
naphthyridin-2-yl)ethyl)pyrrolidin-1-yl)butanoate;

[chemical structure]

methyl (S)-3-(3-(4-(5-((6-((6-((6-((2S,4R)-2-((bis(4-methoxyphenyl)(phenyl)methoxy)methyl)-
4-hydroxypyrrolidin-1-yl)-6-oxohexyl)amino)-6-oxohexyl)amino)-6-oxohexyl)amino)-5-
oxopentanoyl)piperazin-1-yl)-5-(3,5-dimethyl-1H-pyrazol-1-yl)phenyl)-4-((R)-3-(2-(8-(2-
phenoxyacetyl)-5,6,7,8-tetrahydro-1,8-naphthyridin-2-yl)ethyl)pyrrolidin-1-yl)butanoate;

[chemical structure]

4-(((3R,5S)-5-((bis(4-methoxyphenyl)(phenyl)methoxy)methyl)-1-(6-(5-(4-(3-(3,5-dimethyl-
1H-pyrazol-1-yl)-5-((S)-4-methoxy-4-oxo-1-((R)-3-(2-(8-(2-phenoxyacetyl)-5,6,7,8-tetrahydro-1,8-
naphthyridin-2-yl)ethyl)pyrrolidin-1-yl)butan-2-yl)phenyl)piperazin-1-yl)-5-
oxopentanamido)hexanoyl)pyrrolidin-3-yl)oxy)-4-oxobutanoic acid;

[chemical structure]

4-(((3R,5S)-5-((bis(4-methoxyphenyl)(phenyl)methoxy)methyl)-1-(6-(5-(4-(3-(3,5-dimethyl-
1H-pyrazol-1-yl)-5-((R)-4-methoxy-4-oxo-1-((R)-3-(2-(8-(2-phenoxyacetyl)-5,6,7,8-tetrahydro-1,8-
naphthyridin-2-yl)ethyl)pyrrolidin-1-yl)butan-2-yl)phenyl)piperazin-1-yl)-5-
oxopentanamido)hexanoyl)pyrrolidin-3-yl)oxy)-4-oxobutanoic acid;

[chemical structure]

4-(((3R,5S)-5-((bis(4-methoxyphenyl)(phenyl)methoxy)methyl)-1-(6-(6-(5-(4-(3-(3,5-dimethyl-1H-
pyrazol-1-yl)-5-((S)-4-methoxy-4-oxo-1-((R)-3-(2-(8-(2-phenoxyacetyl)-5,6,7,8-tetrahydro-1,8-
naphthyridin-2-yl)ethyl)pyrrolidin-1-yl)butan-2-yl)phenyl)piperazin-1-yl)-5-
oxopentanamido)hexanamido)hexanoyl)pyrrolidin-3-yl)oxy)-4-oxobutanoic acid;

[chemical structure]

4-(((3R,5S)-5-((bis(4-methoxyphenyl)(phenyl)methoxy)methyl)-1-(6-(6-(6-(5-(4-(3-(3,5-dimethyl-1H-
pyrazol-1-yl)-5-((S)-4-methoxy-4-oxo-1-((R)-3-(2-(8-(2-phenoxyacetyl)-5,6,7,8-tetrahydro-1,8-
naphthyridin-2-yl)ethyl)pyrrolidin-1-yl)butan-2-yl)phenyl)piperazin-1-yl)-5-
oxopentanamido)hexanamido)hexanamido)hexanoyl)pyrrolidin-3-yl)oxy)-4-oxobutanoic acid;
and salts thereof.

[1506] In another embodiment, the compound of Formula (X) is selected from the group consisting of,

[chemical structure]

(R)-3-(3-(3,5-dimethyl-1H-pyrazol-1-yl)-5-(4-(5-((6-((R)-3-hydroxypyrrolidin-1-yl)-6-oxohexyl)amino)-
5-oxopentanoyl)piperazin-1-yl)phenyl)-4-((R)-3-(2-(5,6,7,8-tetrahydro-1,8-naphthyridin-2-
yl)ethyl)pyrrolidin-1-yl)butanoic acid;

[chemical structure]

(S)-3-(3-(3,5-dimethyl-1H-pyrazol-1-yl)-5-(4-(5-((6-((R)-3-hydroxypyrrolidin-1-yl)-6-oxohexyl)amino)-
5-oxopentanoyl)piperazin-1-yl)phenyl)-4-((R)-3-(2-(5,6,7,8-tetrahydro-1,8-naphthyridin-2-
yl)ethyl)pyrrolidin-1-yl)butanoic acid;

[chemical structure]

(S)-3-(3-(3,5-dimethyl-1H-pyrazol-1-yl)-5-(4-(5-((5-hydroxypentyl)amino)-5-oxopentanoyl)piperazin-1-
yl)phenyl)-4-((R)-3-(2-(5,6,7,8-tetrahydro-1,8-naphthyridin-2-yl)ethyl)pyrrolidin-1-yl)butanoic acid;

[chemical structure]

methyl (3R)-3-(3-(4-(5-((6-((3R)-3-(((2-cyanoethoxy)(diisopropylamino)phosphaneyl)oxy)pyrrolidin-1-
yl)-6-oxohexyl)amino)-5-oxopentanoyl)piperazin-1-yl)-5-(3,5-dimethyl-1H-pyrazol-1-yl)phenyl)-4-
((R)-3-(2-(8-(2-phenoxyacetyl)-5,6,7,8-tetrahydro-1,8-naphthyridin-2-yl)ethyl)pyrrolidin-1-
yl)butanoate;

[chemical structure]

methyl (3S)-3-(3-(4-(5-((6-((3R)-3-(((2-cyanoethoxy)(diisopropylamino)phosphaneyl)oxy)pyrrolidin-1-
yl)-6-oxohexyl)amino)-5-oxopentanoyl)piperazin-1-yl)-5-(3,5-dimethyl-1H-pyrazol-1-yl)phenyl)-4-
((R)-3-(2-(8-(2-phenoxyacetyl)-5,6,7,8-tetrahydro-1,8-naphthyridin-2-yl)ethyl)pyrrolidin-1-
yl)butanoate;

[chemical structure]

methyl (3S)-3-(3-(4-(5-((5-(((2-cyanoethoxy)(diisopropylamino)phosphaneyl)oxy)pentyl)amino)-5-
oxopentanoyl)piperazin-1-yl)-5-(3,5-dimethyl-1H-pyrazol-1-yl)phenyl)-4-((R)-3-(2-(8-(2-
phenoxyacetyl)-5,6,7,8-tetrahydro-1,8-naphthyridin-2-yl)ethyl)pyrrolidin-1-yl)butanoate;
and salts thereof.

C. Alpha-v-Beta-6 (αvβ6) Integrin Branched Ligands

[1507] In another aspect, the present disclosure provides a compound of Formula (V) or (XV):

[chemical structure]

or a salt thereof, wherein
[1508] x is 2, 3, 4, 5, 6, 7, or 8;
[1509] T is a divalent linking group;
[1510] Δ is a branching group;
[1511] each ZZ is independently -A′-B′-A′- or a linking group formed by a first reactive pair, wherein
   [1512] each A′ is independently a bond, —O—, —S—, or —N(R^{N3})—;
   [1513] each B′ is independently a bond, CH₂, C(O), C(S), C(NR^{N3}), —C═N—, S(O), S(O)₂, P(O)(OH), P(S)(OH), or P(S)(SH); and
   [1514] each R^{N3} is independently hydrogen or C₁₋₆alkyl, or two R^{N3} within the -A′-B′-A′- group taken together with the atoms to which they are connected from a 4-8 membered heterocyclyl;
[1515] Z⁰ is a member of a second reactive pair; and
[1516] R^{T} is —R^{T1} or -G⁰-OR^{T1}, wherein
   [1517] G⁰ is -D⁰-E⁰-F⁰-, wherein
      [1518] D⁰, E⁰, and F⁰ are independently a bond, C₁₋₁₀alkyl, C₂₋₁₀alkenyl, C₂₋₁₀alkynyl, C₃₋₁₀cycloalkyl, 3-10 membered heterocyclyl, aryl, or heteroaryl, each of which is optionally substituted with 1, 2, 3, or 4 R groups; and
      [1519] R^{T1} is hydrogen, a hydroxyl protecting group, a phosphorous coupling group, or -L^{K}-S^{S}, or -L^{L}-oligonucleotide, wherein
         [1520] L^{K} is a support linking group;
         [1521] S^{S} is a solid support, —OR^{SS} or —N(R^{SS})₂, or hydrogen, wherein each
         [1522] R^{SS} is independently hydrogen or C₁₋₆alkyl; and
         [1523] L^{L} is an oligonucleotide linking group; and
            each Φ is a compound of the Formula (XII),

[chemical structure]

wherein:
[1524] Y is O, N(H), S, or CH₂;
[1525] R¹ is hydrogen or C₁₋₆alkyl (e.g., methyl);
[1526] R^{Y} is

[chemical structure]

wherein
   [1527] m is 0, 1, 2, 3, or 4; and
   [1528] each R² is independently R, or two R² groups on adjacent carbon atoms taken together with the atoms to which they are bound form a fused 4-8 membered ring that is optionally substituted by 1, 2, 3 or 4 groups independently selected from group consisting of R and a nitrogen protecting group;
[1529] and
[1530] R^{L} is —N(R³)(R⁴), —O(R⁵), —S(R⁵), or —R⁵, wherein
   [1531] R³ and R⁴ are either
      [1532] (i) R³ is hydrogen or C₁₋₆alkyl and R⁴ is R⁵; or
      [1533] (ii) R³ and R⁴ taken together with the nitrogen atom to which they are attached form a 4-8 membered monocyclic heterocyclyl group that is substituted with R⁵;
   [1534] and
   [1535] R⁵ is -L-* wherein L is -L¹-[G-L²]_{q}-G-L³*,
      [1536] * is the bond to a ZZ; and
      [1537] q is 0 or an integer selected from 1-25; (e.g., 1-20, or 1-15);
      [1538] L¹ is a bond or -B-A-;
      [1539] each L² is independently -A-B-A-;
      [1540] L³ is a bond or -A-B-A-;
      [1541] each G is independently -D-E-F-, wherein
         [1542] D, E, and F are independently a bond, C₁₋₁₀alkyl, C₂₋₁₀alkenyl, C₂₋₁₀alkynyl, C₃₋₁₀cycloalkyl, 3-10 membered heterocyclyl, aryl, or heteroaryl, each of which is optionally substituted with 1, 2, 3, or 4 R groups;
      [1543] each A is independently a bond, —O—, —S—, or —N(R^{N})—;
      [1544] each B is independently a bond, CH₂, C(O), C(S), C(NR^{N}), S(O), S(O)₂, P(O)(OH), P(S)(OH), or P(S)(SH);
      [1545] each R^{N} is independently hydrogen or C₁₋₆alkyl, or two R^{N} within an -A-B-A- group taken together with the atoms to which they are connected from a 4-8 membered heterocyclyl.

[1546] Embodiment for the variables of Formula (V), (XII), and (XV) that are the same as Formula (IV) are as described above for Formula (IV).

[1547] Embodiment for the variables of Formula (V), (XII), and (XV) that are the same as Formula (X) are as described above for Formula (X). For example, embodiments for the variable ZZ are each as described above for Formula (X); embodiments for the variable R^{T} and L are each as described above for Formula (X).

### T Embodiments, Formula (V) and Formula (XV)

[1548] In some embodiments, T is a bond or **-L⁶-G-[L⁵-G¹]_{q1}-L⁴-, wherein ** is the bond to Z⁰ or R^{T};
[1549] q1 is 0, 1, 2, 3, 4, 5, 6, 7, 8, 9, or 10;
[1550] each L⁴, L⁵, and L⁶ are independently a bond or -A¹-B¹-A¹-;
[1551] each G¹ is independently -D¹-E¹-F¹-, wherein D¹, E¹, and F¹ are independently a bond, C₁₋₁₀alkyl, C₂₋₁₀alkenyl, C₂₋₁₀alkynyl, C₃₋₁₀cycloalkyl, 3-10 membered heterocyclyl, aryl, or heteroaryl, each of which is optionally substituted with 1, 2, or 3 R groups;
[1552] each A¹ is independently a bond, —O—, —S—, or —N(R^{N1})—;
[1553] each B¹ is independently a bond, C(O), C(S), C(NR^{N1}), S(O), S(O)₂, P(O)(OH), P(S)(OH), or P(S)(SH);
[1554] each R^{N1} is independently hydrogen or C₁₋₆alkyl, or two R^{N1} within an -A¹-B¹-A¹- group taken together with the atoms to which they are connected from a 4-8 membered heterocyclyl.

[1555] In some embodiments, T is **-L⁶-G¹-L⁵-G¹-L⁴-, wherein ** is the bond to Z⁰ or R^{T};
[1556] L⁴ and L⁶ are independently -A¹-B¹-A¹-;
[1557] each L⁵ is a bond or -A¹-B¹-A¹- (e.g., a bond, -B¹-A¹- or -A¹-B¹-; or a bond);
[1558] each G¹ is independently C₁₋₁₀alkyl, C₂₋₁₀alkenyl, C₂₋₁₀alkynyl, C₃₋₁₀cycloalkyl, 3-10 membered heterocyclyl, aryl, or heteroaryl (e.g., C₁₋₁₀alkyl or C₂₋₁₀alkenyl);
[1559] each A¹ is independently a bond, —O—, —S—, or —N(R^{N1})—, wherein R^{N1} is independently hydrogen or C₁₋₆alkyl; and
[1560] each B¹ is independently a bond, C(O), C(S), S(O)₂, P(O)(OH), or P(S)(OH).

[1561] In some embodiments, T is **-L⁶-G¹-L⁵-G¹-L⁴-, wherein ** is the bond to Z⁰ or R^{T};
[1562] L⁴ and L⁶ are independently -A¹-B¹- or -B¹-A¹-;
[1563] each L⁵ is a bond or -A¹-B¹-A¹- (e.g., a bond, -B¹-A¹- or -A¹-B¹-; or a bond);
[1564] each G¹ is independently C₁₋₁₀alkyl, C₂₋₁₀alkenyl, C₂₋₁₀alkynyl, C₃₋₁₀cycloalkyl, 3-10 membered heterocyclyl, aryl, or heteroaryl (e.g., C₁₋₁₀alkyl or C₂₋₁₀alkenyl);
[1565] each A¹ is independently a bond, —O—, —S—, or —N(R^{N1})—, wherein R^{N1} is independently hydrogen or C₁₋₆alkyl; and
[1566] each B¹ is independently a bond, C(O), C(S), S(O)₂, P(O)(OH), or P(S)(OH).

[1567] In some embodiments, T is **-B′-G¹-L⁵-G¹-B′-, wherein ** is the bond to Z⁰ or R^{T};
[1568] each L⁵ is a bond or -A¹-B¹-A¹- (e.g., a bond, -B¹-A¹- or -A¹-B¹-; or a bond);
[1569] each G¹ is independently C₁₋₁₀alkyl, C₂₋₁₀alkenyl, C₂₋₁₀alkynyl, C₃₋₁₀cycloalkyl, 3-10 membered heterocyclyl, aryl, or heteroaryl (e.g., C₁₋₁₀alkyl or C₂₋₁₀alkenyl);
[1570] each A¹ is independently a bond, —O—, —S—, or —N(R^{N1})—, wherein R^{N1} is independently hydrogen or C₁₋₆alkyl; and
[1571] each B¹ is independently a bond, C(O), C(S), S(O)₂, P(O)(OH), or P(S)(OH).

[1572] In some embodiments, T is **-L⁶-G¹-L⁵-G¹-L⁴-, wherein ** is the bond to Z⁰ or R^{T};
[1573] L⁴ and L⁶ are independently -A¹-B¹-A¹-;
[1574] each L⁵ is a bond or -A¹-B¹-A¹- (e.g., a bond, -B¹-A¹- or -A¹-B¹-; or a bond);
[1575] each G¹ is independently C₁₋₁₀alkyl or C₂₋₁₀alkenyl;
[1576] each A¹ is independently a bond, —O—, —S—, or —N(R^{N1})—, wherein R^{N1} is independently hydrogen or C₁₋₆alkyl; and
[1577] each B¹ is independently a bond, C(O), C(S), S(O)₂, P(O)(OH), or P(S)(OH).

[1578] In some embodiments, T is **-L⁶-G¹-L⁵-G¹-L⁴-, wherein ** is the bond to Z⁰ or R^{T};
[1579] L⁴ and L⁶ are independently -B¹-A¹- or -A¹-B¹-;
[1580] each L⁵ is a bond or -A¹-B¹-A¹- (e.g., a bond, -B¹-A¹- or -A¹-B¹-; or a bond);
[1581] each G¹ is independently C₁₋₁₀alkyl or C₂₋₁₀alkenyl;
[1582] each A¹ is independently a bond, —O—, —S—, or —N(R^{N1})—, wherein R^{N1} is independently hydrogen or C₁₋₆alkyl; and
[1583] each B¹ is independently a bond, C(O), C(S), S(O)₂, P(O)(OH), or P(S)(OH).

[1584] In some embodiments, T is **-B′-G¹-L⁵-G¹-B¹-, wherein ** is the bond to Z⁰ or R^{T};
[1585] each L⁵ is a bond or -A¹-B¹-A¹- (e.g., a bond, -B¹-A¹- or -A¹-B¹-; or a bond);
[1586] each G¹ is independently C₁₋₁₀alkyl or C₂₋₁₀alkenyl;
[1587] each A¹ is independently a bond, —O—, —S—, or —N(R^{N1})—, wherein R^{N1} is independently hydrogen or C₁₋₆alkyl; and
[1588] each B¹ is independently a bond, C(O), C(S), S(O)₂, P(O)(OH), or P(S)(OH).

[1589] In some embodiments, T is **-B¹-C₁₋₁₀alkyl-L⁵-C₁₋₁₀alkyl-B¹-, wherein
[1590] ** is the bond to Z⁰ or R^{T};
[1591] each L⁵ is a bond or -A¹-B¹-A¹- (e.g., a bond, -B¹-A¹- or -A¹-B¹-; or a bond);
[1592] each A¹ is independently a bond, —O—, —S—, or —N(R^{N1})—, wherein R^{N1} is independently hydrogen or C₁₋₆alkyl; and
[1593] each B¹ is independently a bond, C(O), C(S), S(O)₂, P(O)(OH), or P(S)(OH).

[1594] In some embodiments, T is -L⁴-G¹-L⁶-**, wherein ** is the bond to Z⁰ or R^{T};
[1595] L⁴ and L⁶ are independently -A¹-B¹-A¹-;
[1596] each G¹ is independently C₁₋₁₀alkyl, C₂₋₁₀alkenyl, C₂₋₁₀alkynyl, C₃₋₁₀cycloalkyl, 3-10 membered heterocyclyl, aryl, or heteroaryl, each of which is optionally substituted with 1, 2, or 3 R groups;
[1597] each A¹ is independently a bond, —O—, —S—, or —N(R^{N1})—, wherein R^{N1} is hydrogen or C₁₋₆alkyl; and
[1598] each B¹ is independently a bond, C(O), C(S), S(O)₂, P(O)(OH), or P(S)(OH).

[1599] In some embodiments, T is -L⁴-G¹-L⁶-**, wherein ** is the bond to Z⁰ or R^{T};
[1600] L⁴ is —C(O)O— or C(O)N(R^{N1})—, wherein R^{N1} is hydrogen or C₁₋₆alkyl;
[1601] L⁶ is —OP(O)(OH)O— or —OP(S)(OH)O—; and
[1602] each G¹ is independently C₁₋₁₀alkyl, C₂₋₁₀alkenyl, C₂₋₁₀alkynyl, C₃₋₁₀cycloalkyl, 3-10 membered heterocyclyl, aryl, or heteroaryl, each of which is optionally substituted with 1, 2, or 3 R groups.
   In some embodiments, T is selected from the following, wherein ** is the bond to Z⁰ or R^{T}:
[1603] (a) **—C(O)—C₁₋₁₀alkyl-L⁵-C₁₋₁₀alkylC(O)—,
[1604] (b) **—C(O)—C₂₋₁₀alkyl-L⁵-C₂₋₁₀alkyl-C(O)—,
[1605] (c) **—C(O)—C₄₋₁₀alkyl-L⁵-C₄₋₁₀alkyl-C(O)—,
[1606] (d) **—C(O)—C₆₋₁₀alkyl-L⁵-C₆₋₁₀alkyl-C(O)—,
[1607] (e) **—C(O)—C₂₋₈alkyl-L⁵-C₂₋₈alkyl-C(O)—,
[1608] (f) **—C(O)—C₂₋₆alkyl-L⁵-C₂₋₆alkyl-C(O)—,
[1609] (g) **—C(O)—C₂₋₄alkyl-L⁵-C₂₋₄alkyl-C(O)—
[1610] (h) **—C(O)—C₂₋₂₀alkyl-C(O)—,
[1611] (i) **—C(O)—C₂₋₁₂alkyl-C(O)—,
[1612] (j) **—C(O)—C₆₋₂₀alkyl-C(O)—,
[1613] (k) **—C(O)—C₆₋₁₂alkyl-C(O)—,
[1614] (l) **—C(O)—C₁₀alkyl-C(O)— and
[1615] (m) **—C(O)—CH₂CH₂—C(O)—,
   wherein each L⁵ is a bond or -A¹-B¹-A¹- (e.g., a bond, -B¹-A¹- or -A¹-B¹-; or a bond), wherein each A¹ is independently a bond, —O—, —S—, or —N(R^{N1})—, wherein R^{N1} is independently hydrogen or C₁₋₆alkyl; and each B¹ is independently a bond, C(O), C(S), S(O)₂, P(O)(OH), or P(S)(OH).

[1616] In some embodiments, T is selected from the following, wherein ** is the bond to Z⁰ or R^{T}:
[1617] (n) **—N(H)C(O)—C₂₋₂₀alkyl-C(O)—,
[1618] (o) **—N(H)C(O)—C₆₋₂₀alkyl-C(O)—,
[1619] (p) **—N(H)C(O)—C₆₋₁₂alkyl-C(O)—,
[1620] (q) **—N(H)C(O)—C₁₀alkyl-C(O)—,
[1621] (r) **—C(O)—C₂₋₂₀alkyl-C(O)N(H)—,
[1622] (s) **—C(O)—C₆₋₂₀alkyl-C(O)N(H)—,
[1623] (t) **—C(O)—C₆₋₁₂alkyl-C(O)N(H)—,
[1624] (u) **—C(O)—C₁₀alkyl-C(O)N(H)—,
[1625] (v) **—N(H)C(O)—C₂₋₂₀alkyl-C(O)N(H)—,
[1626] (w) **—N(H)C(O)—C₆₋₂₀alkyl-C(O)N(H)—,
[1627] (x) **—N(H)C(O)—C₆₋₁₂alkyl-C(O)N(H)—,
[1628] and
[1629] (y) **—N(H)C(O)—C₁₀alkyl-C(O)N(H).

[1630] In some embodiments, T is -L⁴-G¹-L⁶-**, wherein ** is the bond to Z⁰ or R^{T};
[1631] L⁴ is —C(O)O— or C(O)N(R^{N1})—, wherein R^{N1} is hydrogen or C₁₋₆alkyl;
[1632] L⁶ is —OP(O)(OH)O— or —OP(S)(OH)O—; and
[1633] each G¹ is independently C₃₋₁₀cycloalkyl, 3-10 membered heterocyclyl, aryl, or heteroaryl, each of which is optionally substituted with one R group.

[1634] In some embodiments, T is -L⁴-G¹-L⁶-**, wherein ** is the bond to Z⁰ or R^{T};
[1635] L⁴ is —C(O)O— or C(O)N(R^{N1})—, wherein R^{N1} is hydrogen or C₁₋₆alkyl;
[1636] L⁶ is —OP(O)(OH)O— or —OP(S)(OH)O—; and
[1637] each G¹ is independently C₃₋₁₀cycloalkyl or 3-10 membered heterocyclyl.

[1638] In some embodiments, T is -L⁴-G¹-L⁶-**, wherein ** is the bond to Z⁰ or R^{T};
[1639] L⁴ is —C(O)O— or C(O)N(R^{N1})—, wherein R^{N1} is hydrogen or C₁₋₆alkyl;
[1640] L⁶ is —OP(O)(OH)O— or —OP(S)(OH)O—; and
[1641] each G¹ is independently C₃₋₁₀cycloalkyl or 3-10 membered heterocyclyl.

[1642] In some embodiments, T is

[chemical structure]

wherein ** is the bond to Z⁰ or R^{T}; and X is O or S (e.g., S).

[1643] In some embodiments, T is **-L⁶-[G⁵-O]_{q5}-G⁵-L⁴-, wherein ** is the bond to Z⁰ or R^{T};
[1644] q5 is an integer selected from 1 to 20;
[1645] L⁴ and L⁶ are independently -A¹-B¹-A¹-, wherein
   [1646] each A¹ is independently a bond, —O—, —S—, or —N(R^{N1})—, wherein R^{N1} is hydrogen or C₁₋₆alkyl;
   [1647] each B¹ is independently a bond, C(O), C(S), S(O)₂, P(O)(OH), or P(S)(OH);
[1648] each G⁵ is independently C₁₋₁₀alkyl; and
[1649] each L¹⁰ is —O—.

[1650] In some embodiments, T is **—C(O)—[CH₂CH₂—O]_{q5}-G⁵-L⁴-, wherein ** is the bond to Z⁰ or R^{T};
[1651] q5 is an integer selected from 1 to 20;
[1652] L⁴ is -A¹-B¹-A¹-, wherein
   [1653] each A¹ is independently a bond, —O—, —S—, or —N(R^{N1})—, wherein R^{N1} is hydrogen or C₁₋₆alkyl;
   [1654] each B¹ is independently a bond, C(O), C(S), S(O)₂, P(O)(OH), or P(S)(OH);
[1655] G⁵ is C₁₋₁₀alkyl.

[1656] In some embodiments, T is **—C(O)—[CH₂CH₂—O]_{q5}-G⁵-L⁴-, wherein ** is the bond to Z⁰ or R^{T};
[1657] q5 is an integer selected from 1 to 20;
[1658] L⁴ is -A¹-B¹ or -B¹-A¹-, wherein
   [1659] each A¹ is independently —O— or —N(H)—,
   [1660] each B¹ is independently C(O),
[1661] G⁵ is C₁₋₁₀alkyl (e.g., C₂₋₁₀alkyl or C₂₋₆alkyl).

[1662] In some embodiments, T is **—C(O)—[CH₂CH₂—O]_{q5}—C₂₋₁₀alkyl-C(O)N(H)—, wherein ** is the bond to Z⁰ or R^{T}, wherein q5 is an integer selected from 1 to 20 (e.g., 1 to 10, or 2 to 10; or 2-8; or 1; or 2; or 3; or 4.) In some embodiments, Formulae (V) and (XV) are according to one of Formulae (Va) through (Vc) and (XVa) through (XVc), respectively:

[chemical structure]

### Δ Embodiments, Formula (V) and Formula (XV)

[1663] In some embodiments, Δ is

#-[G²-L⁷]_{q2}-* or #-G³-([L⁷-G⁴]_{q3}-*)_{y},
[1664] wherein
[1665] # is the bond to T;
[1666] y is 1, 2, 3, 4, or 5;
[1667] q2 is 1, 2, 3, 4, 5, 6, 7, or 8;
[1668] q3 is 0, 1, 2, 3, 4, 5, 6, 7, or 8;
[1669] each G², G³, and G⁴ is independently -D²-E²-F²-, wherein
   [1670] D², E², and F² are independently a bond, C₁₋₁₀alkyl, C₂₋₁₀alkenyl, C₂₋₁₀alkynyl, C₃₋₁₀cycloalkyl, 3-10 membered heterocyclyl, aryl, or heteroaryl, each of which is optionally substituted with 1, 2, 3, 4, or 5 R groups, and
   [1671] wherein each G² and G⁴ optionally contains at least one bond to a ZZ (e.g., one bond to a ZZ);
[1672] or G³ is N and y is 2;
[1673] each L⁷ is independently -A²-B²-A²-; wherein
   [1674] each A² is independently a bond, —O—, —S—, or —N(R^{N2})—;
   [1675] each B² is independently a bond, C(O), C(S), C(NR^{N2}), S(O), S(O)₂, P(O)(OH), P(S)(OH), or P(S)(SH); and
   [1676] each R^{N2} is independently hydrogen, C₁₋₆alkyl, a bond to a ZZ, or two R^{N2} within an -A²-B²-A²- group taken together with the atoms to which they are connected from a 4-8 membered heterocyclyl;
[1677] and
[1678] each R^{B} is independently halogen, cyano, azido, nitro, —N(R¹⁰)₂, —O(R¹⁰), —S(R¹⁰), —C(O)OR¹⁰, —C(O)R¹⁰, —C(O)N(R¹⁰)₂, —C(NR¹⁰)OR¹⁰, —C(NR¹⁰)R¹⁰, —C(NR¹⁰)N(R¹⁰)₂, —C(S)OR¹⁰, —C(S)R¹⁰, —C(S)N(R¹⁰)₂, —S(O)₂R¹⁰, —S(O)₂OR¹⁰, —S(O)₂N(R¹⁰)₂, —N(R¹⁰)C(O)OR¹⁰, —N(R¹⁰)C(O) R¹⁰, —N(R¹⁰)C(O)N(R¹⁰)₂, —N(R¹⁰)S(O)₂R¹⁰, —N(R¹⁰)S(O)₂OR¹⁰, —N(R¹⁰)S(O)₂N(R¹⁰)₂, —OC(O)OR¹⁰, —OC(O)R¹⁰, —OC(O)N(R¹⁰)₂, —OS(O)₂R¹⁰, —OS(O)₂OR¹⁰, —OS(O)₂N(R¹⁰)₂, or —SC(O)R¹⁰, wherein each R¹⁰ is independently hydrogen, C₁₋₁₀alkyl, C₂₋₁₀alkenyl, C₂₋₁₀alkynyl, C₃₋₁₀cycloalkyl, 3-10 membered heterocyclyl, aryl, or heteroaryl. provided that Δ contains x bonds to ZZ.

[1679] In some embodiments, Δ is #4-[G²-L⁷]_{q2}-* wherein
[1680] # is the bond to T;
[1681] q2 is 1, 2, 3, 4, 5, 6, 7, or 8;
[1682] q3 is 0, 1, 2, 3, 4, 5, 6, 7, or 8;
[1683] each G², G³, and G⁴ is independently -D²-E²-F²-, wherein
   [1684] D², E², and F² are independently a bond, C₁₋₁₀alkyl, C₂₋₁₀alkenyl, C₂₋₁₀alkynyl, C₃₋₁₀cycloalkyl, 3-10 membered heterocyclyl, aryl, or heteroaryl, each of which is optionally substituted with 1, 2, 3, 4, or 5 R groups, and
   [1685] wherein each G² optionally contains at least one bond to ZZ;
[1686] each L⁷ is independently -A²-B²-A²-;
[1687] each A² is independently a bond, —O—, —S—, or —N(R^{N2})—;
[1688] each B² is independently a bond, C(O), C(S), C(NR^{N2}), S(O), S(O)₂, P(O)(OH), P(S)(OH), or P(S)(SH);
[1689] each R^{N2} is independently hydrogen, C₁₋₆alkyl, a bond to a ZZ, or two R^{N2} within an -A²-B²-A²- group taken together with the atoms to which they are connected from a 4-8 membered heterocyclyl;
   [1690] each R^{B} is independently halogen, cyano, azido, nitro, —N(R¹⁰)₂, —O(R¹⁰), —S(R¹⁰), —C(O)OR¹⁰, —C(O)R¹⁰, —C(O)N(R¹⁰)₂, —C(NR¹⁰)OR¹⁰, —C(NR¹⁰)R¹⁰, —C(NR¹⁰)N(R¹⁰)₂, —C(S)OR¹⁰, —C(S)R¹⁰, —C(S)N(R¹⁰)₂, —S(O)₂R¹⁰, —S(O)₂OR¹⁰, —S(O)₂N(R¹⁰)₂, —N(R¹⁰)C(O)OR¹⁰, —N(R¹⁰)C(O)R¹⁰, —N(R¹⁰)C(O)N(R¹⁰)₂, —N(R¹⁰)S(O)₂R¹⁰, —N(R¹⁰)S(O)₂OR¹⁰, —N(R¹⁰)S(O)₂ N(R¹⁰)₂, —OC(O)OR¹⁰, —OC(O)R¹⁰, —OC(O)N(R¹⁰)₂, —OS(O)₂R¹⁰, —OS(O)₂OR¹⁰, —OS(O)₂N(R¹⁰)₂, or —SC(O)R¹⁰, wherein
      [1691] each R¹⁰ is independently hydrogen, C₁₋₁₀alkyl, C₂₋₁₀alkenyl, C₂₋₁₀alkynyl, C₃₋₁₀cycloalkyl, 3-10 membered heterocyclyl, aryl, or heteroaryl.

[1692] In one embodiment, -Δ- is #-[G²-L⁷]_{q2}-*, where # is the bond to T and * is a bond to a ZZ group. For example, such embodiments include the following,

[chemical structure]

wherein each * is a bond to a ZZ; # is the bond to T,
[1693] each G² is independently C₁₋₁₀alkyl, C₂₋₁₀alkenyl, C₃₋₁₀cycloalkyl, 3-10 membered heterocyclyl, aryl, or heteroaryl, each of which is optionally substituted with 1, 2, 3, 4, or 5 R^{B} groups; and each L⁷ is independently -A²-B²-A²-, wherein each A² is independently a bond, —O—, —S—, or —N(R^{N2})—; each B² is independently a bond, C(O), S(O)₂, P(O)(OH), or P(S)(OH).

[1694] In one embodiment, each G² is independently C₁₋₁₀alkyl, each optionally substituted with 1 or 2 R^{B} groups. In one embodiment, each G² is independently C₁₋₁₀alkyl.

[1695] In one embodiment, each L⁷ is independently -A²-B²-A²-, wherein each A² is independently a bond, —O—, —S—, or —N(R^{N2})—; and each B² is independently a bond, C(O) or S(O)₂, provided that at least one A² is not a bond.

[1696] In one embodiment, each L⁷ is independently -A²-B²— or -B²-A²-, wherein each A² is independently, —O—, —S—, or —N(R^{N2})—; and each B² is independently a bond, C(O) or S(O)₂.

[1697] For example, such embodiments include each of the following,

[chemical structure]

[chemical structure]

wherein # is the bond to T and each * is a bond to a ZZ group. ; and each G² is independently C₁₋₁₀alkyl.

[1698] For example, such embodiments include each of the following, wherein # is the bond to T and each * is a bond to a ZZ;

[chemical structure]

wherein # is the bond to T and each * is a bond to a ZZ group.

[1699] In one embodiment, -#-G³-([L⁷-G⁴]_{q3}-*)_{y}, where # is the bond to T and * is a bond to a ZZ group.

[1700] For example, such embodiments include each of the following,

[chemical structure]

[chemical structure]

wherein # is the bond to T, each * is a bond to a ZZ group, and
[1701] each L⁷ is selected from the group consisting of —O—, —S—, —N(H)—, —C(O)O—, —OC(O)—, —C(O)N(H)—, —OC(O)O—, —N(H)C(O)O—, —OC(O)N(H)—, —OP(O)(OH)O—, or —OP(S)(OH)O—; and each G⁴ is independently -D²-E²-F²-, wherein
   [1702] each D² and F² are independently a bond or C₁₋₁₀alkyl, C₂₋₁₀alkenyl, C₂₋₁₀alkynyl, C₃₋₁₀cycloalkyl, 3-10 membered heterocyclyl, aryl, or heteroaryl, each of which is optionally substituted with 1, 2, 3, 4, or 5 R^{B} groups, and
   [1703] each E² is independently bond, C₁₋₁₀alkyl, C₂₋₁₀alkenyl, C₃₋₁₀cycloalkyl, 3-10 membered heterocyclyl, aryl, or heteroaryl, each of which is optionally substituted with 1, 2, 3, 4, or 5 R^{B} groups, provided that E² is not a bond with D² and F² are each bonds.

[1704] In one embodiment of -#-G³-([L⁷-G⁴]_{q3}-*)_{y},
[1705] each L⁷ is selected from the group consisting of —O—, —S—, —N(H)—, —N(H)C(O)—, —C(O)N(H)—, —OP(O)(OH)O—, and —OP(S)(OH)O—;
[1706] and each G⁴ is independently -D²-E²-F²-, wherein
   [1707] each D² and F² are independently a bond or C₁₋₁₀alkyl;
   [1708] each E² is independently C₁₋₁₀alkyl, C₂₋₁₀alkenyl, C₃₋₁₀cycloalkyl, 3-10 membered heterocyclyl, aryl, or heteroaryl, each of which is optionally substituted with 1, 2, 3, 4, or 5 R groups.

[1709] In one embodiment of -#-G³-([L⁷-G⁴]_{q3}-*)_{y},
[1710] each L⁷ is selected from the group consisting of —O—, —S—, —N(H)—, —N(H)C(O)—, —C(O)N(H)—, —OP(O)(OH)O—, and —OP(S)(OH)O—;
[1711] and each G⁴ is independently C₁₋₁₀alkyl, C₂₋₁₀alkenyl, C₃₋₁₀cycloalkyl, 3-10 membered heterocyclyl, aryl, or heteroaryl, each of which is optionally substituted with 1, 2, 3, 4, or 5 R^{B}.
   In one embodiment of -#-G³-([L⁷-G⁴]_{q3}-*)_{y},
[1712] each L⁷ is selected from the group consisting of —O—, —S—, —N(H)—, —N(H)C(O)—, —C(O)N(H)—, —OP(O)(OH)O—, and —OP(S)(OH)O—;
[1713] and each G⁴ is independently C₁₋₁₀alkyl which is optionally substituted with 1 or, 2 5 R^{B} groups.
   In one embodiment of -#-G³-([L⁷-G⁴]_{q3}-*)_{y}
[1714] each L⁷ is selected from the group consisting of —O—, —S—, —N(H)—, —N(H)C(O)—, C(O)N(H)—, —OP(O)(OH)O—, and —OP(S)(OH)O—;
[1715] and each G⁴ is independently C₁₋₁₀alkyl.
   In one embodiment of -#-G³-([L⁷-G⁴]_{q3}-*)_{y},
[1716] each L⁷ is selected from the group consisting of —N(H)C(O)— and C(O)N(H)—;
[1717] and each G⁴ is independently C₁₋₁₀alkyl.

[1718] For example, such embodiments include each of the following, wherein each * is a bond to a ZZ;

[chemical structure]

wherein # is the bond to T and each * is a bond to a ZZ group.

### ZZ Embodiments, Formulae (V) and (Va) Through (Vc) and Formulae (XV) and (XVa) Through (XVc)

[1719] In embodiments of Formulae (V) and (Va) through (Vc) and Formulae (XV) and (XVa) through (XVc), ZZ is a linking group formed by a reactive pair.

[1720] In some embodiments, ZZ comprises a group selected from the group consisting of

[chemical structure]

[1721] In some embodiments, ZZ comprises Group(1). In some embodiments, ZZ comprises Group(2). In some embodiments, ZZ comprises Group(3). In some embodiments, ZZ comprises Group(4). In some embodiments, ZZ comprises Group(5). In some embodiments, ZZ comprises Group(6). In some embodiments, ZZ comprises Group(7). In some embodiments, ZZ comprises Group(8). In some embodiments, ZZ comprises Group(9). In some embodiments, ZZ comprises Group(10). In some embodiments, ZZ comprises Group(11). In some embodiments, ZZ comprises Group(12).

[1722] In some embodiments, wherein ZZ is -A′-B′-A′-.

[1723] In some embodiments, ZZ is -A′-B′-A′-, wherein
[1724] each A′ is independently a bond, —O—, —S—, or —N(R^{N3})—, wherein R^{N3} is independently hydrogen or C₁₋₆alkyl and
[1725] each B′ is independently CH₂, C(O), C(S), S(O)₂, P(O)(OH), or P(S)(OH).

[1726] In some embodiments, ZZ is CH₂, C(O), C(S), S(O)₂, P(O)(OH), or P(S)(OH).

[1727] In some embodiments, ZZ is C(O), C(S), or S(O)₂.

[1728] In some embodiments, ZZ is P(O)(OH), or P(S)(OH).

[1729] In some embodiments, ZZ is —C(O)—.

[1730] In some embodiments, ZZ is -A′-B′- or -B′-A′- wherein
[1731] each A′ is independently —O—, —S—, or —N(R^{N3}
[1732] each B′ is independently CH₂, C(O), C(S), S(O)₂, P(O)(OH), or P(S)(OH); and
[1733] each R^{N3} is independently hydrogen or C₁₋₆alkyl.

[1734] In some embodiments, ZZ is -A′-B′- or -B′-A′- wherein
[1735] each A′ is independently —O— or —N(R^{N3})—, wherein R^{N3} is independently hydrogen or C₁₋₆ alkyl.
[1736] each B′ is independently CH₂, C(O), S(O)₂, P(O)(OH), or P(S)(OH); and
[1737] each R^{N3} is independently hydrogen or C₁₋₆alkyl.

[1738] In some embodiments, ZZ is —CH₂O—, —OCH₂—, —S—S—, —C═N—, —C═N—O—, —C═N—N(R^{N3})—, —N═C—, —O—N═C—, —N(R^{N3})—N═C—, —C(O)N(R^{N3})—, —N(R^{N3})C(O)—, —C(O)O—, —OC(O)—, —OC(O)N(R^{N3})—, —N(R^{N3})C(O)O—, —N(R^{N3})C(O)N(R^{N3})—, —S(O)₂N(R^{N3})—, —N(R^{N3})S(O)₂—, —OP(O)(OH)O—, —OP(S)(OH)O—, —OP(O)(OH)—, —OP(S)(OH)—, —P(O)(OH)O—, or —P(S)(OH)O—. wherein R^{N3} is independently hydrogen or C₁₋₆alkyl.

[1739] In some embodiments, ZZ is —CH₂O— or —OCH₂—.

[1740] In some embodiments, ZZ is —S—S—.

[1741] In some embodiments, ZZ is —C═N—, —C═N—O—, —C═N—N(R^{N3})—, —N═C—, —O—N═C—, or —N(R^{N3})—N═C—, wherein R^{N3} is independently hydrogen or C₁₋₆alkyl.

[1742] In some embodiments, ZZ is —C(O)N(R^{N3})—, —N(R^{N3})C(O)—, —C(O)O—, —OC(O)—, —OC(O)N(R^{N3})—, —N(R^{N3})C(O)O—, —N(R^{N3})C(O)N(R^{N3})—, —S(O)₂N(R^{N3})—, or —N(R^{N3})S(O)₂—, wherein R^{N3} is independently hydrogen or C₁₋₆alkyl.

[1743] In some embodiments, ZZ is —C(O)N(R^{N3})— or —N(R^{N3})C(O)—, wherein R^{N3} is independently hydrogen or C₁₋₆alkyl.

[1744] In some embodiments, ZZ is —C(O)O— or —OC(O)—.

[1745] In some embodiments, ZZ is —OC(O)N(R^{N3})—, —N(R^{N3})C(O)O—, or —N(R^{N3})C(O)N(R^{N3}), wherein R^{N3} is independently hydrogen or C₁₋₆alkyl.

[1746] In some embodiments, ZZ is —N(R^{N3})C(O)N(R^{N3})—, wherein R^{N3} is independently hydrogen or C₁₋₆alkyl.

[1747] In some embodiments, ZZ is —OC(O)N(R^{N3})— or —N(R^{N3})C(O)O—, wherein R^{N3} is independently hydrogen or C₁₋₆alkyl.

[1748] In some embodiments, ZZ is —OP(O)(OH)O—, —OP(S)(OH)O—, —OP(O)(OH)—, —OP(S)(OH)—, —P(O)(OH)O—, or —P(S)(OH)O—.

[1749] In some embodiments, ZZ is —OP(O)(OH)O— or —OP(S)(OH)O—.

[1750] In some embodiments, ZZ is —OP(S)(OH)O—.

[1751] In some embodiments, ZZ is —OP(O)(OH)O—.

[1752] In some embodiments, ZZ is —OP(O)(OH)—, —OP(S)(OH)—, —P(O)(OH)O—, or —P(S)(OH)O—.

[1753] In some embodiments, ZZ is —OP(S)(OH)— or —P(S)(OH)O—.

[1754] In some embodiments, ZZ is —OP(O)(OH)— or —P(O)(OH)O—.

### Z Embodiments, Formulae (V) and (Va) Through (Vc)

[1755] In some embodiments of any one of Formulae (V) and (Va) through (Vc), Z⁰ is azido, amino, hydroxy, —N═C═O, —N═C═S, —SR^{Z1}, —C(O)H, —C(O)OR^{Z}, —C(S)OR^{Z}, —CH₂—X, or a Michael acceptor,
[1756] wherein R^{Z} is hydrogen or C₁₋₁₀alkyl;
[1757] R^{Z} is hydrogen, pyridyl, or benzotriazolyl;
[1758] X is a leaving group.

[1759] In some embodiments, Z⁰ is COOH.

[1760] In some embodiments, Z⁰ is NH₂.

[1761] In some embodiments, Z⁰ is N₃.

[1762] In some embodiments, Z⁰ is hydroxy.

[1763] In some embodiments, Z⁰ is —SH.

[1764] In some embodiments, Z⁰ is

[chemical structure]

[1765] In some embodiments, Z⁰ is a Michael acceptor (e.g., N-maleimido).

[1766] In some embodiments, Z⁰ comprises a terminal alkyne,

[chemical structure]

[1767] In some embodiments, Z⁰ comprises

[chemical structure]

wherein L⁵³ is a bond, —C(O)—, —C(S)—, —S(O)₂—, —C(O)O—, C(O)N(H)—, —S(O)₂N(H)—.

[1768] In some embodiments, Z⁰ comprises

[chemical structure]

[1769] In some embodiments, Z⁰ comprises

[chemical structure]

for example, Z is

[chemical structure]

wherein L⁵² is a bond, —O—, —N(H)—, —S—, —C(O)—, —C(S)—, —S(O)₂—, —C(O)O—, —OC(O)—, —C(O)N(H)—, N(H)C(O)—, —OC(O)O—, —OC(O)N(H)—, N(H)C(O)O—, —N(H)C(O)N(H)—, or —S(O)₂N(H)—

[chemical structure]

[1770] In some embodiments, Z⁰ comprises

[chemical structure]

[1771] In some embodiments, Z⁰ comprises

[chemical structure]

such as

[chemical structure]

wherein L⁵¹ is a bond, —O—, —N(H)—, —S—, —C(O)—, —C(S)—, —S(O)₂—, —C(O)O—, —OC(O)—, —C(O)N(H)—, N(H)C(O)—, —OC(O)O—, —OC(O)N(H)—, N(H)C(O)O—, —N(H)C(O)N(H)—, —CH₂O—, —CH₂N(H)—, —CH₂S—, —CH₂C(O)O—, —CH₂OC(O)—, —CH₂C(O)N(H)—, —CH₂N(H)C(O)—, —CH₂OC(O)O—, —CH₂OC(O)N(H)—, —CH₂N(H)C(O)O—, —CH₂N(H)C(O)N(H)—, or —S(O)₂N(H)—

[chemical structure]

[1772] In some embodiments, Z⁰ comprises

[chemical structure]

for example, Z is

[chemical structure]

wherein R^{Z10} is hydrogen or C₁₋₁₀alkyl; and L⁵⁰ is a bond, —O—, —N(H)—, —S—, —C(O)—, —C(S)—, —S(O)₂—, —C(O)O—, —OC(O)—, —C(O)N(H)—, N(H)C(O)—, —OC(O)O—, —OC(O)N(H)—, N(H)C(O)O—, —N(H)C(O)N(H)—, —CH₂O—, —CH₂N(H)—, —CH₂S—, —CH₂C(O)O—, —CH₂OC(O)—, —CH₂C(O)N(H)—, —CH₂N(H)C(O)—, —CH₂OC(O)O—, —CH₂OC(O)N(H)—, —CH₂N(H)C(O)O—, —CH₂N(H)C(O)N(H)—, or —S(O)₂N(H)—.

[1773] In some embodiments, Z⁰ is an activated ester

[chemical structure]

[1774] In some embodiments, Z⁰ is

[chemical structure]

[1775] In some embodiments, Z⁰ is

[chemical structure]

[1776] In some embodiments, Z⁰ is

[chemical structure]

[1777] In some embodiments, Z⁰ is

[chemical structure]

[1778] In some embodiments, Z⁰ is

[chemical structure]

### R^{T} Embodiments Formula (XV) and (XVa) Through (XVc)

[1779] In some embodiments of Formula (XV), R^{T} is R^{T1} is as defined for Formula (X), for example -L^{L}-oligonucleotide.

[1780] In some embodiments of Formula (XV), R^{T} is -G⁰-OR^{T1}, wherein R^{T1} is as defined for Formula (X) and G⁰ is selected from:
[1781] (l) G⁰ is -D⁰-E⁰-F⁰-, wherein
   [1782] D⁰ and F⁰ are independently a bond or C₁₋₁₀alkyl optionally substituted with 1, 2, 3, or 4 R groups; and
   [1783] E⁰ is C₃₋₁₀cycloalkyl, 3-10 membered heterocyclyl, aryl, or heteroaryl, each of which is optionally substituted with 1, 2, 3, or 4 R groups;
[1784] (m) G⁰ is -D⁰-E⁰-F⁰-, wherein
   [1785] D⁰ and F⁰ are independently a bond or C₁₋₁₀alkyl optionally substituted with 1, 2, 3, or 4 R groups; and
   [1786] E⁰ is 3-10 membered heterocyclyl optionally substituted with 1, 2, 3, or 4 R groups; and
[1787] (n) G⁰ is 3-10 membered heterocyclyl optionally substituted with 1 or 2 R groups; examples include

[chemical structure]

[1788] (o) G⁰ is pyrrolidinyl, piperidinyl, piperazinyl, or morpholinyl, each optionally substituted with 1 or 2 R groups; examples include:

[chemical structure]

and
[1789] (p) G⁰ is 3-10 membered-heterocyclyl-C₁₋₁₀alkyl, optionally substituted with 1, 2, 3, or 4 R groups; examples include,

[chemical structure]

[1790] (q) G⁰ is C₁₋₁₀alkyl, C₂₋₁₀alkenyl, C₂₋₁₀alkynyl, each of which is optionally substituted with 1, 2, 3, or 4 R groups (e.g., 1 or 2 R groups);
[1791] (r) G⁰ is C₁₋₁₀alkyl or C₂₋₁₀alkenyl, each of which is optionally substituted with 1 or 2 R groups;
[1792] (s) G⁰ is C₁₋₁₀alkyl optionally substituted with 1 or 2 R groups;
[1793] (t) G⁰ is C₁₋₁₀alkyl, optionally substituted with —O(R^{a}), wherein R^{a} is independently hydrogen, C₁₋₆alkyl, or a hydroxyl protecting group; e.g.,

[chemical structure]

[1794] (u) G⁰ is C₁₋₁₀alkyl,
[1795] and
[1796] (v) G⁰ is absent (a bond);
   wherein * represents the bond to T, the broken bond represents the bond to OR^{T1}, and R is —C₁₋₆alkyl-OR^{a} or —OR^{a}, wherein R^{a} is independently hydrogen, C₁₋₆alkyl, or a hydroxyl protecting group;

### Φ Embodiments

[1797] In one embodiment, R^{Y} is defined in the structure of Formula (XII) according to any one of the R^{Y} Embodiments of Formula (IV).

[1798] In another embodiment, Formula (XII) has the structure described above for any embodiment of Formula (IV), where the variable Z is replaced by a bond to a ZZ group.

[1799] In another embodiment, Formula (XII) has the structure of any one of Formula (XII-a) through (XII-h) and (XII-r):

[chemical structure]

[chemical structure]

wherein p is 0, 1, 2 or 3;
[1800] each R²¹ is independently selected from group consisting of R and a nitrogen protecting group, and R^{P} is a nitrogen protecting group, and
[1801] R, R¹, and R^{L} are as defined above for Formula (XII).

### L Embodiments Formula (XII) and (XII-a) Through (XII-h) and (XII-r)

[1802] In some embodiments of any one of Formula (XII) and Formulae (XII-a) through (XII-h) and (XII-r), L is -L¹-[G-L²]-G-L³-*, wherein * is the bond to a ZZ group.

[1803] In another embodiment, wherein L is -L¹-[G-L²]-G-L³-*, wherein q is 0, 1, 2, 3, 4, or 5.

[1804] In another embodiment, L is -L¹-[G-L²]-G-L³-*, wherein q is 0, 1, 2, 3, or 4

[1805] In another embodiment, L is -L¹-[G-L²]-G-L³-*, wherein q is 0, 1, 2, or 3.

[1806] In another embodiment, L is -L¹-[G-L²]-G-L³-*, wherein q is 0, 1, or 2.

[1807] In another embodiment, L is -L¹-[G-L²]-G-L³-*, wherein q is 1, 2, 3, 4, or 5.

[1808] In another embodiment, L is -L¹-[G-L²]-G-L³-*, wherein q is 1, 2, 3, or 4.

[1809] In another embodiment, L is -L¹-[G-L²]-G-L³-*, wherein q is 1, 2, or 3.

[1810] In another embodiment, L is -L¹-[G-L²]-G-L³-*, wherein q is 1 or 2.

[1811] In another embodiment, L is -L¹-[G-L²]-G-L³-*, wherein q is 4. In another embodiment, L is -L¹-[G-L²]_{q}-G-L³-*, wherein q is 3. In another embodiment, L is -L¹-[G-L²]-G-L³-*, wherein q is 2.

[1812] In another embodiment, L is -L¹-G-L²-G-L³-*. In another embodiment nts, L is -L1-G-L³-*.

[1813] In another embodiment, L is -G-L³-*. In another embodiment, L is -L¹-G-*. In another embodiment, L is -G-*.

[1814] In some embodiments, each instance of A-B-A- is independently selected from the group consisting of —C(O)O—, —OC(O)—, —C(O)N(R^{N})—, —N(R^{N})C(O)—, —OC(O)O—, —OC(O)N(R^{N})—, —N(R^{N})C(O)O—, —N(R^{N})C(O)N(R^{N})—, —OP(O)(OH)O—, —OP(S)(OH)O—, —O—, and —N(R^{N})—, wherein each R^{N} is independently hydrogen or C₁₋₆alkyl.

[1815] In some embodiments, each instance of A-B-A- is independently selected from the group consisting of —C(O)O—, —OC(O)—, —C(O)N(R^{N})—, —N(R^{N})C(O)—, —OC(O)N(R^{N})—, —N(R^{N})C(O)O—, —N(R^{N})C(O)N(R^{N})—, —O—, and —N(R^{N})—, wherein each R^{N} is independently hydrogen or C₁₋₆alkyl.

[1816] In some embodiments, each instance of A-B-A- is independently selected from the group consisting of —C(O)N(R^{N})—, —N(R^{N})C(O)—, —OC(O)N(R^{N})—, —N(R^{N})C(O)O—, —N(R^{N})C(O)N(R^{N})—, —O—, and —N(R^{N})—, wherein each R^{N} is independently hydrogen or C₁₋₆alkyl.

[1817] In some embodiments, each instance of A-B-A- is independently selected from the group consisting of —C(O)O—, —OC(O)—, —C(O)N(R^{N})—, —N(R^{N})C(O)—, —O—, and —N(R^{N})—, wherein each R^{N} is independently hydrogen or C₁₋₆alkyl.

[1818] In some embodiments, each instance of A-B-A- is independently selected from the group consisting of —C(O)N(R^{N})—, —N(R^{N})C(O)—, —O—, and —N(R^{N})—, wherein each R^{N} is independently hydrogen or C₁₋₆alkyl.

[1819] In some embodiments,
[1820] D and F are each independently a bond, C₁₋₁₀alkyl, C₂₋₁₀alkenyl, or C₂₋₁₀alkynyl, each optionally substituted with 1, 2, 3, or 4 R groups; and
[1821] E is C₁₋₁₀alkyl, C₂₋₁₀alkenyl, C₂₋₁₀alkynyl, C₃₋₁₀cycloalkyl, 3-10 membered heterocyclyl, aryl, or heteroaryl, each of which is optionally substituted with 1, 2, 3, or 4 R groups.

[1822] In some embodiments,
[1823] D and F are each independently a bond or C₁₋₁₀alkyl optionally substituted with 1, 2, 3, or 4 R groups; and
[1824] E is C₁₋₁₀alkyl, C₂₋₁₀alkenyl, C₂₋₁₀alkynyl, C₃₋₁₀cycloalkyl, 3-10 membered heterocyclyl, aryl, or heteroaryl, each of which is optionally substituted with 1, 2, 3, or 4 R groups.

[1825] In some embodiments, each G is independently C₁₋₁₀alkyl, C₂₋₁₀alkenyl, C₂₋₁₀alkynyl, C₃₋₁₀cycloalkyl, 3-10 membered heterocyclyl, aryl, or heteroaryl, each of which is optionally substituted with 1, 2, 3, or 4 R groups.

[1826] In some embodiments, each G is independently C₁₋₁₀alkyl, optionally substituted with 1, 2, or 3 R groups.

[1827] In some embodiments, each G is independently C₁₋₁₀alkyl, optionally substituted with 1 or 2 R groups.

[1828] In some embodiments, each G is independently C₁₋₁₀alkyl, optionally substituted with one R group

[1829] In some embodiments, L is -L¹-G-L³-*, wherein * is the bond to a ZZ group;
[1830] G is -D-E-F-, wherein D, E, and F are independently a bond, C₁₋₁₀alkyl, C₂₋₁₀alkenyl, C₂₋₁₀alkynyl, C₃₋₁₀cycloalkyl, 3-10 membered heterocyclyl, aryl, or heteroaryl, each of which is optionally substituted with 1, 2, 3, or 4 R groups;
[1831] L¹ is -B-A-;
[1832] L³ is a bond or -A-B-A-;
[1833] each A is independently a bond, —O—, —S—, or —N(R^{N})—, wherein each R^{N} is independently hydrogen or C₁₋₆alkyl.
[1834] each B is independently a bond, CH₂, C(O), S(O)₂, P(O)(OH), or P(S)(OH); and

[1835] In some embodiments, L is -L¹-G-L³-*, wherein * is the bond to a ZZ group;
[1836] G is C₁₋₁₀alkyl, C₂₋₁₀alkenyl, C₂₋₁₀alkynyl, C₃₋₁₀cycloalkyl, 3-10 membered heterocyclyl, aryl, or heteroaryl, each of which is optionally substituted with 1, 2, 3, or 4 R groups;
[1837] L¹ is -B-;
[1838] L³ is a bond or -A-B-A-;
[1839] each A is independently a bond, —O—, —S—, or —N(R^{N})—, wherein each R^{N} is independently hydrogen or C₁₋₆alkyl; and
[1840] each B is independently a bond, CH₂, C(O), S(O)₂, P(O)(OH), or P(S)(OH; and

[1841] In some embodiments, L is -L¹-G-*, wherein * is the bond to a ZZ group;
[1842] G is C₁₋₁₀alkyl, C₂₋₁₀alkenyl, C₂₋₁₀alkynyl, C₃₋₁₀cycloalkyl, 3-10 membered heterocyclyl, aryl, or heteroaryl, each of which is optionally substituted with 1, 2, 3, or 4 R groups;
[1843] L¹ is -B-A-, wherein,
   [1844] A is a bond, —O—, —S—, or —N(R^{N})—, wherein each R^{N} is independently hydrogen or C₁₋₆ alkyl; and
   [1845] B is a bond, C(O), C(S), S(O)₂, P(O)(OH), or P(S)(OH).

[1846] In some embodiments, L is -L¹-G-*, wherein * is the bond to a ZZ group;
[1847] G is C₁₋₁₀ alkyl, C₂₋₁₀alkenyl, C₂₋₁₀alkynyl, each of which is optionally substituted with 1 or 2 R groups;
[1848] L¹ is -B-A-, wherein
   [1849] A is a bond, —O—, —S—, or —N(R^{N})—, each R^{N} is independently hydrogen or C₁₋₆alkyl; and
   [1850] B is a bond, C(O), S(O)₂, P(O)(OH), or P(S)(OH).

[1851] In some embodiments L is -L¹-G-*, wherein * is the bond to a ZZ group;
[1852] G is C₁₋₁₀alkyl or C₂₋₁₀alkenyl, each of which is optionally substituted with 1 or 2 R groups;
[1853] L¹ is bond, C(O), S(O)₂, P(O)(OH), or P(S)(OH); and
[1854] R^{N} is hydrogen or C₁₋₆alkyl.

[1855] In some embodiments, L is

[chemical structure]

wherein * is the bond to a ZZ group; k is an integer from 1 to 10; L¹ is bond, C(O), C(S), C(NR^{N}), S(O)₂, P(O)(OH), or P(S)(OH); and R^{N} is hydrogen or C₁₋₆alkyl.

[1856] In some embodiments, L is

[chemical structure]

wherein * is the bond to a ZZ group; k is an integer from 1 to 10; L¹ is bond, C(O), P(O)(OH), or P(S)(OH).

[1857] In some embodiments, L is

[chemical structure]

wherein * is the bond to a ZZ group; k is an integer from 1 to 10; or an integer from 2 to 10; or an integer from 3 to 10; or an integer from 4 to 10; or an integer from 5 to 10; or an integer from 5 to 9; or an integer from 5 to 8; or an integer from 5 to 7.

[1858] In some embodiments, L is

[chemical structure]

wherein * is the bond to a ZZ group; t is an integer from 0 to 10 (e.g., an integer from 1 to 5; or 1; or 2; or 3).

[1859] In some embodiments, L is

[chemical structure]

wherein * is the bond to a ZZ group; t is an integer from 0 to 10 (e.g., an integer from 1 to 5 or 1; or 2; or 3); a is an integer from 1 to 3; and s and s′ are each independently an integer from 1 to 24 (e.g., an integer from 1 to 16; an integer from 1 to 10; an integer from 3 to 10; an integer from 3 to 7; or an integer from 4 to 6).

[1860] In some embodiments, L is

[chemical structure]

wherein * is the bond to a ZZ group; a is 1, 2 or 3; and each s, s′, and s″ independently is an integer from 1 to 24 (e.g., an integer from 1 to 16, an integer from 1 to 10, an integer from 3 to 10, an integer from 3 to 7, or an integer from 4 to 6).

[1861] In some embodiments, L is

[chemical structure]

wherein * is the bond to a ZZ group; and s, s′, and s″ are independently is an integer from 1 to 24 (e.g., an integer from 1 to 16, an integer from 1 to 10, an integer from 3 to 10, an integer from 3 to 7, or an integer from 4 to 6).

[1862] In some embodiments, L is

[chemical structure]

wherein * is the bond to a ZZ group; and each s, s′, and s″ independently is an integer from 1 to 24 (e.g., an integer from 1 to 16, an integer from 1 to 10, an integer from 3 to 10, an integer from 3 to 7, or an integer from 4 to 6).

[1863] In some embodiments, L is

[chemical structure]

wherein * is the bond to ZZ; s and k are independently is an integer from 1 to 20 (e.g., an integer from 1 to 16, an integer from 1 to 10, an integer from 3 to 10, an integer from 3 to 7 or an integer from 4 to 6); and w is an integer from 1 to 10 (e.g., an integer from 1 to 16, an integer from 1 to 10, an integer from 3 to 10, an integer from 3 to 7 or an integer from 4 to 6).

[1864] In some embodiments, L is

[chemical structure]

wherein * is the bond to ZZ and w is an integer from 1 to 20 (e.g., an integer from 1 to 16, an integer from 1 to 10, an integer from 3 to 10, an integer from 3 to 7 or an integer from 4 to 6).

### R^{L} Embodiments, Formula (XII) and (XII-a) Through (XII-h) and (XII-r)

[1865] In some embodiments of any one of Formula (XII) and Formulae (XII-a) through (XII-h) and (XII-r), R^{L} is —N(R³)(R⁴), wherein R³ is hydrogen or C₁₋₆alkyl and R⁴ is R⁵.

[1866] In some embodiments, R^{L} is —N(R³)(R⁴), wherein R^{P3} is hydrogen and R⁴ is R⁵.

[1867] In some embodiments, R^{L} is —N(R³)(R⁴), wherein R^{P3} is C₁₋₃alkyl and R⁴ is R⁵.

[1868] In some embodiments, R^{L} is —N(R³)(R⁴), wherein R^{P3} is methyl and R⁴ is R⁵.

[1869] In some embodiments, R^{L} is —N(R³)(R⁴), wherein R³ and R⁴ taken together with the nitrogen atom to which they are attached form a 4-8 membered monocyclic heterocyclyl group that is substituted with R⁵.

[1870] In some embodiments, R^{L} is —N(R³)(R⁴), wherein R³ and R⁴ taken together with the nitrogen atom to which they are attached form a 4-8 membered monocyclic heterocyclyl group that is substituted with R⁵, provided that R³ and R⁴ taken together with the nitrogen atom to which they are attached do not form a morpholino group.

[1871] In some embodiments, R^{L} is —N(R³)(R⁴), wherein R³ and R⁴ taken together with the nitrogen atom to which they are attached form a group that is piperidinyl, piperazinyl, pyrrolidinyl, imidazolidinyl, pyrazolidinyl, oxazolidinyl, thiazolidinyl, azetidinyl, pyrrolinyl, imidazolinyl, or pyrazolinyl, each substituted with R⁵.

[1872] In some embodiments, R^{L} is

[chemical structure]

[1873] In some embodiments, R^{L} is

[chemical structure]

wherein * is a bond to a ZZ group; t is an integer from 0 to 10 (e.g., 0, 1, 2, 3, 4, 5, 6, 7, 8, 9 or 10); a is an integer from 1 to 3 and s and s′ are each independently an integer from 1 to 24 (e.g., an integer from 1 to 16, an integer from 1 to 10, an integer from 3 to 10, an integer from 3 to 7 or an integer from 4 to 6).

[1874] In some embodiments, R^{L} is

[chemical structure]

wherein * is a bond to a ZZ group; a is an integer from 1 to 3; and s, s′, and s″ are each independently an integer from 1 to 24 (e.g., an integer from 1 to 16, an integer from 1 to 10, an integer from 3 to 10, an integer from 3 to 7 or an integer from 4 to 6).

[1875] In some embodiments, R^{L} is

[chemical structure]

wherein * is a bond to a ZZ group; and s, s′, and s″ are independently is an integer from 1 to 24 (e.g., an integer from 1 to 16, an integer from 1 to 10, an integer from 3 to 10, an integer from 3 to 7 or an integer from 4 to 6.

[1876] In some embodiments, R^{L} is

[chemical structure]

wherein * is a bond to a ZZ group; s, s′, and s″ are independently an integer from 1 to 24 (e.g., an integer from 1 to 16, an integer from 1 to 10, an integer from 3 to 10, an integer from 3 to 7 or an integer from 4 to 6); and t is an integer from 1 to 10 (e.g., an integer from 1 to 8, an integer from 1 to 5, an integer from 1 to 3, or 1, or 2, or 3).

[1877] In some embodiments, R^{L} is

[chemical structure]

wherein * is a bond to a ZZ group; s is an integer from 1 to 24 (e.g., an integer from 1 to 16, an integer from 1 to 10, an integer from 3 to 10, an integer from 3 to 7 or an integer from 4 to 6).

[1878] In some embodiments, R^{L} is —O(R⁵).

[1879] In some embodiments, R^{L} is

[chemical structure]

wherein * is a bond to a ZZ group; s is an integer from 1 to 24 (e.g., an integer from 1 to 16, an integer from 1 to 10, an integer from 3 to 10, an integer from 3 to 7 or an integer from 4 to 6); and t is an integer from 0 to 10 (e.g., an integer from 1 to 8, an integer from 1 to 5, an integer from 1 to 3, or 1, or 2, or 3).

[1880] In some embodiments, R^{L} is —R⁵.

[1881] In some embodiments, R^{L} is

[chemical structure]

wherein * is a bond to a ZZ group; s is 1-24 (e.g., an integer from 1 to 16, an integer from 1 to 10, an integer from 3 to 10, an integer from 3 to 7 or an integer from 4 to 6).

[1882] In some embodiments, R^{L} is

[chemical structure]

wherein * is a bond to a ZZ group; t is 0 to 10 (e.g., 1-5; or 1-3; or 1; or 2; or 3).

[1883] In some embodiments, R^{L} is

[chemical structure]

wherein * is a bond to a ZZ group; s and k are independently is an integer from 1 to 20 (e.g., an integer from 1 to 16, an integer from 1 to 10, an integer from 3 to 10, an integer from 3 to 7 or an integer from 4 to 6); and w is an integer from 1 to 10 (e.g., an integer from 1 to 16, an integer from 1 to 10, an integer from 3 to 10, an integer from 3 to 7 or an integer from 4 to 6).

[1884] In some embodiments, R^{L} is

[chemical structure]

wherein * is a bond to a ZZ group.

[1885] In some embodiments, R^{L} is

[chemical structure]

wherein * is a bond to a ZZ group and w is an integer selected from 1-10 (e.g., 2-10, 2-8, 4-8).

[1886] In some embodiments, the compound of Formula (XII) is according to one of Formulae (XII-i) through (XII-l) and (XII-s).

[chemical structure]

wherein * is a bond to a ZZ group,
[1887] p is 0, 1, 2, or 3 (e.g., 0);
[1888] each R²¹ is independently selected from group consisting of R and a nitrogen protecting group,
[1889] and L is defined according to Formula (XII), or according to any of the preceding embodiments of L.

[1890] In one embodiment of Formulae (XII-i) through (XII-1) and (XII-s), R¹ is hydrogen. In another embodiment of Formulae (XII-i) through (XII-1) and (XII-s), R¹ is C₁₋₆alkyl (e.g., methyl or t-butyl).

[1891] In some embodiments, the compound of Formula (XII) is according to one of Formulae (XII-m) through (XII-q) and (XII-t):

[chemical structure]

[chemical structure]

or a salt thereof, wherein * is a bond to a ZZ group,
[1892] p is 0, 1 or 2;
[1893] each R²¹ is independently selected from group consisting of R;
[1894] R^{P} is hydrogen or a nitrogen protecting group (e.g., a nitrogen protecting group),
[1895] and L is defined according to Formula (XII), or according to any of the preceding embodiments of L, wherein R and the remaining variables are as defined in Formula (XII).

[1896] In one embodiment of Formulae (XII-m) through (XII-q) and (XII-t), R¹ is hydrogen. In another embodiment of Formulae (XII-m) through (XII-q) and (XII-t), R¹ is C₁₋₆alkyl (e.g., methyl or t-butyl).

[1897] In one embodiment of the compound of Formula (V) or (XV),
[1898] Φ is selected from Formula (XII) and any one of Formula (XII-a) through (XII-q) and (XII-t); ZZ is —CH₂O—, —OCH₂—, —S—S—, —C═N—, —C═N—O—, —C═N—N(R^{N3})—, —N═C—, —O—N═C—, —N(R^{N3})—N═C—, —C(O)N(R^{N3})—, —N(R^{N3})C(O)—, —C(O)O—, —OC(O)—, —OC(O)N(R^{N3})—, —N(R^{N3})C(O)O—, —N(R^{N3})C(O)N(R^{N3})—, —S(O)₂N(R^{N3})—, —N(R^{N3})S(O)₂—, —OP(O)(OH)O—, —OP(S)(OH)O—, —OP(O)(OH)—, —OP(S)(OH)—, —P(O)(OH)O—, or —P(S)(OH)O—. wherein R^{N3} is independently hydrogen or C₁₋₆alkyl;
[1899] Δ is selected from,

[chemical structure]

[1900] wherein # is the bond to T and each * is a bond to a ZZ group.
   [1901] each G² is independently C₁₋₁₀alkyl;
[1902] Z⁰ is COOH, NH₂, N₃, hydroxy, —SH, or an activated ester or Z⁰ comprise

[chemical structure]

and
[1903] R^{T} is

[chemical structure]

wherein ** represents the bond to T,
   and the remaining variables are as defined in Formula (XV), and any embodiment thereof.

[1904] In one embodiment of the compound of Formula (V) or (XV),
[1905] Φ is selected from Formula (XII) and any one of Formula (XII-a) through (XII-q) and (XII-t);
[1906] ZZ is —C(O)N(R^{N3})—, —N(R^{N3})C(O)—, —C(O)O—, —OC(O)—, wherein R^{N3} is independently hydrogen or C₁₋₆alkyl;
[1907] Δ is selected from,

[chemical structure]

[1908] wherein # is the bond to T and each * is a bond to a ZZ group.
   [1909] each G² is independently C₁₋₁₀alkyl;
[1910] Z⁰ is COOH, NH₂, N₃, hydroxy, —SH, or an activated ester or Z⁰ comprises

[chemical structure]

[1911] and
[1912] R^{T} is

[chemical structure]

wherein ** represents the bond to T,
   and the remaining variables are as defined in Formula (XV), and any embodiment thereof.

[1913] In one embodiment of the compound of Formula (V) or (XV),
[1914] Φ is selected from Formula (XII) and any one of Formula (XII-a) through (XII-q) and (XII-t);
[1915] ZZ is —CH₂O—, —OCH₂—, —S—S—, —C═N—, —C═N—O—, —C═N—N(R^{N3})—, —N═C—, —O—N═C—, —N(R^{N3})—N═C—, —C(O)N(R^{N3})—, —N(R^{N3})C(O)—, —C(O)O—, —OC(O)—, —OC(O)N(R^{N3})—, —N(R^{N3})C(O)O—, —N(R^{N3})C(O)N(R^{N3})—, —S(O)₂N(R^{N3})—, —N(R^{N3})S(O)₂—, —OP(O)(OH)O—, —OP(S)(OH)O—, —OP(O)(OH)—, —OP(S)(OH)—, —P(O)(OH)O—, or —P(S)(OH)O—. wherein R^{N3} is independently hydrogen or C₁₋₆alkyl; Δ is selected from,

[chemical structure]

[1916] wherein # is the bond to T and each * is a bond to a ZZ group,
[1917] G³ is C₁₋₁₀alkyl;
[1918] each G⁴ is independently C₁₋₁₀alkyl;
[1919] Z⁰ is COOH, NH₂, N₃, hydroxy, —SH, or an activated ester or Z⁰ comprises

[chemical structure]

and
[1920] R^{T} is

[chemical structure]

wherein ** represents the bond to T,
   and the remaining variables are as defined in Formula (XV), and any embodiment thereof.

[1921] In one embodiment of the compound of Formula (V) or (XV),
[1922] Φ is selected from Formula (XII) and any one of Formula (XII-a) through (XII-q) and (XII-t);
[1923] ZZ is —C(O)—, —C(O)N(R^{N3})—, —N(R^{N3})C(O)—, —C(O)O—, —OC(O)—, wherein R^{N3} is independently hydrogen or C₁₋₆alkyl;
[1924] Δ is selected from,

[chemical structure]

[1925] wherein # is the bond to T and each * is a bond to a ZZ group;
[1926] Z⁰ is COOH, NH₂, N₃, hydroxy, —SH, or an activated ester or Z⁰ comprises

[chemical structure]

[1927] and
[1928] R^{T} is

[chemical structure]

wherein ** represents the bond to T,
   and the remaining variables are as defined in Formula (XV), and any embodiment thereof.

[1929] In one embodiment of the compound of Formula (V) or (XV),
[1930] Φ is selected from Formula (XII) and any one of Formula (XII-i) through (XII-q) and (XII-t);
[1931] ZZ is —OP(O)(OH)O—, —OP(S)(OH)O—, —C(O)N(R^{N3})—, —N(R^{N3})C(O)—, —C(O)O—, —OC(O)—, wherein R^{N3} is independently hydrogen or C₁₋₆alkyl;
[1932] Δ is

[chemical structure]

[1933] T is **-L⁶-G¹-L⁵-G¹-L⁴-, wherein ** is the bond to Z⁰ or R^{T};
   [1934] L⁴ and L⁶ are independently -B¹-A¹- or -A¹-B¹-;
   [1935] each L⁵ is a bond or -A¹-B¹-A¹- (e.g., a bond, -B¹-A¹- or -A¹-B¹-; or a bond);
   [1936] each G¹ is independently C₁₋₁₀alkyl or C₂₋₁₀alkenyl;
   [1937] each A¹ is independently a bond, —O—, —S—, or —N(R^{N1})—, wherein R^{N1} is independently hydrogen or C₁₋₆alkyl; and
   [1938] each B¹ is independently a bond, C(O), C(S), S(O)₂, P(O)(OH), or P(S)(OH).
[1939] Z⁰ is COOH, NH₂, N₃, hydroxy, —SH, or an activated ester or Z⁰ comprises

[chemical structure]

[1940] and
[1941] R^{T} is

[chemical structure]

wherein ** represents the bond to T,
   and the remaining variables are as defined in Formula (XV), and any embodiment thereof.

[1942] In one embodiment of the compound of Formula (V) or (XV),
[1943] Φ is selected from Formula (XII) and any one of Formula (XII-m) through (XII-q) and (XII-t);
[1944] ZZ is —OP(O)(OH)O—, —OP(S)(OH)O—, —C(O)N(R^{N3})—, —N(R^{N3})C(O)—, —C(O)O—, —OC(O)—, wherein R^{N3} is independently hydrogen or C₁₋₆alkyl;
[1945] Δ is

[chemical structure]

[1946] T is **-L⁶-G¹-L⁵-G¹-L⁴-, wherein ** is the bond to Z⁰ or R^{T};
   [1947] L⁴ and L⁶ are independently -B¹-A¹- or -A¹-B¹-;
   [1948] each L⁵ is a bond or -A¹-B¹-A¹- (e.g., a bond, -B¹-A¹- or -A¹-B¹-; or a bond);
   [1949] each G¹ is independently C₁₋₁₀alkyl or C₂₋₁₀alkenyl;
   [1950] each A¹ is independently a bond, —O—, —S—, or —N(R^{N1})—, wherein R^{N1} is independently hydrogen or C₁₋₆alkyl; and
   [1951] each B¹ is independently a bond, C(O), C(S), S(O)₂, P(O)(OH), or P(S)(OH).
[1952] Z⁰ is COOH, NH₂, N₃, hydroxy, —SH, or an activated ester or Z⁰ comprises

[chemical structure]

[1953] and
[1954] R^{T} is

[chemical structure]

wherein ** represents the bond to T,
   and the remaining variables are as defined in Formula (XV), and any embodiment thereof.

[1955] In one embodiment of the compound of Formula (V) or (XV),
[1956] Φ is selected from Formula (XII) and any one of Formula (XII-m) through (XII-q) and (XII-t);
[1957] ZZ is —C(O)N(H)— or —N(H)C(O)—;
   Δ is
   T is **-L⁶-G¹-L⁵-G¹-L⁴-, wherein ** is the bond to Z⁰ or R^{T};
[1958] L⁴ is -A¹-B¹-;
[1959] L⁶ is -B¹-;
[1960] L⁵ is a bond, -B¹-A¹-, or -A¹-B¹-;
[1961] each G¹ is independently C₁₋₁₀alkyl;
[1962] each A¹ is independently a bond, —O— or —N(H);
[1963] each B¹ is C(O);
   Z⁰ is COOH, NH₂, N₃, hydroxy, —SH, or an activated ester or Z⁰ comprises

[chemical structure]

and

### R^{T} is

[chemical structure]

wherein * * represents the bond to T, and the remaining variables are as defined in Formula (XV), and any embodiment thereof.

[1964] In one embodiment of the compound of Formula (XV) is according to the structure,

[chemical structure]

wherein R^{P3} is hydrogen or a hydroxyl protecting group (e.g., 4,4′-dimethoxytrityl (DMTr))
[1965] Φ is selected from Formula (XII) and any one of Formula (XII-m) through (XII-q) and (XII-t); ZZ is —C(O)N(H)— or —N(H)C(O)—; and
[1966] T is **-L⁶-G¹-L⁵-G¹-L⁴-, wherein ** is the bond to Z⁰ or R^{T};
   [1967] L⁴ is -A¹-B¹-;
   [1968] L⁶ is -B¹-;
   [1969] L⁵ is a bond, -B¹-A¹-, or -A¹-B¹-;
   [1970] each G¹ is independently C₁₋₁₀alkyl;
[1971] each A¹ is independently a bond, —O— or —N(H);
[1972] each B¹ is C(O);
   and the remaining variables are as defined in Formula (XV), and any embodiment thereof.

[1973] In one embodiment of the compound of Formula (V) is according to the structure,

[chemical structure]

[1974] Φ is selected from Formula (XII) and any one of Formula (XII-m) through (XII-q) and (XII-t); ZZ is —C(O)N(H)— or —N(H)C(O)—; and
[1975] T is **-L⁶-G¹-L⁵-G¹-L⁴-, wherein ** is the bond to Z⁰ or R^{T};
   [1976] L⁴ is -A¹-B¹-;
   [1977] L⁶ is -B¹-;
   [1978] L⁵ is a bond, -B¹-A¹-, or -A¹-B¹-;
   [1979] each G¹ is independently C₁₋₁₀alkyl;
   [1980] each A¹ is independently a bond, —O— or —N(H);
   [1981] each B¹ is C(O); and
[1982] Z is COOH, NH₂, N₃, hydroxy, —SH, or an activated ester or Z⁰ comprises

[chemical structure]

and the remaining variables are as defined in Formula (XV), and any embodiment thereof.

[1983] In one embodiment of the compound of Formula (V) or (XV),
[1984] Φ is selected from Formula (XII) and any one of Formula (XII-m) through (XII-q) and (XII-t);
[1985] ZZ is —OP(O)(OH)O—, —OP(S)(OH)O—, —C(O)N(R^{N3})—, —N(R^{N3})C(O)—, —C(O)O—, —OC(O)—, wherein R^{N3} is independently hydrogen or C₁₋₆alkyl;
[1986] Δ is r

[chemical structure]

[1987] T is ***-L⁶-[G⁵-O]_{q5}-G⁵-L⁴-, wherein
   [1988] q5 is an integer selected from 1 to 20;
   [1989] L⁴ and L⁶ are independently -A¹-B¹-A¹-, wherein
      [1990] each A¹ is independently a bond, —O—, —S—, or —N(R^{N1})—, wherein R^{N1} is hydrogen or C₁₋₆alkyl; and
      [1991] each B¹ is independently a bond, C(O), C(S), S(O)₂, P(O)(OH), or P(S)(OH);
      [1992] each G⁵ is independently C₁₋₁₀alkyl;
[1993] Z is COOH, NH₂, N₃, hydroxy, —SH, or an activated ester or Z⁰ comprises

[chemical structure]

[1994] and
[1995] R^{T} is

[chemical structure]

wherein ** represents the bond to T,
   and the remaining variables are as defined in Formula (XV), and any embodiment thereof.

[1996] In one embodiment of the compound of formula (XV), is of the structure,

[chemical structure]

[1997] wherein
[1998] Φ is selected from Formula (XII) and any one of Formula (XII-m) through (XII-q) and (XII-t), wherein L is

[chemical structure]

wherein * is the bond to ZZ; s and k are independently is an integer from 1 to 20 (e.g., an integer from 1 to 16, an integer from 1 to 10, an integer from 3 to 10, an integer from 3 to 7 or an integer from 4 to 6); and w is an integer from 1 to 10 (e.g., an integer from 1 to 16, an integer from 1 to 10, an integer from 3 to 10, an integer from 3 to 7 or an integer from 4 to 6); ;
[1999] ZZ is —C(O)N(H)—, —N(H)C(O)—;
[2000] T is ***-L⁶-[G⁵-O]_{q5}-G⁵-L⁴-, wherein
   [2001] q5 is an integer selected from 1 to 20;
   [2002] L⁴ and L⁶ are independently -A¹-B¹-A¹-, wherein
      [2003] each A¹ is independently a bond, —O—, —S—, or —N(R^{N1})—, wherein R^{N1} is hydrogen or C₁₋₆alkyl; and each B¹ is independently a bond, C(O), C(S), S(O)₂, P(O)(OH), or P(S)(OH);
      [2004] each G⁵ is independently C₁₋₁₀alkyl;
         and the remaining variables are as defined in Formula (XV), and any embodiment thereof.

[2005] In one embodiment of the compound of formula (XV), is of the structure,

[chemical structure]

[2006] wherein
[2007] Φ is selected from Formula (XII) and any one of Formula (XII-m) through (XII-q) and (XII-t), wherein L is

[chemical structure]

wherein * is the bond to ZZ and w is an integer from 1 to 20 (e.g., an integer from 1 to 16, an integer from 1 to 10, an integer from 3 to 10, an integer from 3 to 7 or an integer from 4 to 6;
[2008] ZZ is —C(O)N(H)—, —N(H)C(O)—;
[2009] T is **—C(O)—[CH₂CH₂—O]_{q5}—C₂₋₁₀alkyl-C(O)N(H)—, wherein ** is the bond to the pyrrolidine ring and q5 is an integer selected from 1 to 20 (e.g., 1 to 10, or 2 to 10; or 2-8; or 1; or 2; or 3; or 4); and the remaining variables are as defined in Formula (XV), and any embodiment thereof.

### R^{T1} Embodiments, Formula (XV)

[2010] In embodiments of any embodiments of R^{L} of Formula (XV), Formula (XV-a) through (XV-k),
[2011] R^{T1} is -L^{L}-oligonucleotide, wherein L^{L} is a divalent linker that connects to the 3′-end of the oligonucleotide, the 5′-end of the oligonucleotide, or an internal 2′- or 3′ position on a internal nucleotide (i.e., a nucleotide that is not the 5′-terminal or 3′-terminal nucleoside).

[2012] In some embodiments, R^{T1} is -L^{L}-oligonucleotide, wherein L^{L} is a divalent linker that connects to the 3′-end of the oligonucleotide, such as one of:
[2013] directly to the 3′-carbon of the 3′-terminal nucleoside;
[2014] directly to the 3′-O of the 3′-terminal nucleoside;
[2015] directly to the 4′-carbon of the 3′-terminal nucleoside;
[2016] directly to the 2′-carbon of the 3′-terminal nucleoside; or
[2017] directly to the 2′-O of the 3′-terminal nucleoside.

[2018] In some embodiments, R^{T1} is -L^{L}-oligonucleotide, wherein L^{L} is a divalent linker that connects to the 5′-end of the oligonucleotide, such as one of:
[2019] directly to the 5′-carbon of the 5′-terminal nucleoside;
[2020] directly to the 5′-O of the 5′-terminal nucleoside;
[2021] directly to the 4′-carbon of the 5′-terminal nucleoside;
[2022] directly to the 2′-carbon of the 5′-terminal nucleoside; or
[2023] directly to the 2′-O of the 5′-terminal nucleoside.

[2024] In some embodiments, R^{T1} is -L^{L}-oligonucleotide, wherein L^{L} is a divalent linker that connects to an internal 2′- or 3′ position on an internal nucleotide.

[2025] In some embodiments, R^{T1} is -L^{L}-oligonucleotide, wherein L^{L} is a divalent linker that connects to an internal 2′-position on a internal nucleotide.

[2026] In another embodiment of any of the preceding embodiments of R^{T1}, when L^{L} connects to a carbon atom on a nucleoside, then L^{L} is -B³-A³-, wherein
[2027] B³ is —P(O)(OH)—, —P(S)(OH)—, or —P(S)(SH)—; and
[2028] A³ is —O—, —S—, or —N(H)—.

[2029] In another embodiment, when L^{L} connects to a carbon atom on a nucleoside, then L^{L} is -B³-A³-, wherein
[2030] B³ is —P(O)(OH)— or —P(S)(OH)—; and
[2031] A³ is —O—.

[2032] In another embodiment, when L^{L} connects to a oxygen atom on a nucleoside, then L^{L} is —P(O)(OH)—, —P(S)(OH)—, or —P(S)(SH).

[2033] In another embodiment, when L^{L} connects to a oxygen atom on a nucleoside, then L^{L} is —P(O)(OH)— or —P(S)(OH)—.

[2034] In another embodiment, when L^{L} connects to a oxygen atom on a nucleoside, then L^{L} is —P(O)(OH)—.

[2035] In another embodiment, when L^{L} connects to a oxygen atom on a nucleoside, then L^{L} is —P(S)(OH)—.

[2036] In another embodiment, when L^{L} connects to a oxygen atom on a nucleoside, then
[2037] L^{L} is -B³-A³-L^{L1}-A³-B³-, wherein
   [2038] B³ is a bond, —C(O)—, C(S)—, C(NH), S(O), S(O)₂, —P(O)(OH)—, —P(S)(OH)—, or —P(S)(SH);
   [2039] A³ is a bond, —O—, —S—, or —N(H)—; and
   [2040] L^{L1} is C₁₋₁₀alkyl, C₂₋₁₀alkenyl, C₂₋₁₀alkynyl, C₃₋₁₀cycloalkyl, 3-10 membered heterocyclyl, aryl, or heteroaryl.

[2041] In another embodiment, when L^{L} connects to a oxygen atom on a nucleoside, then L^{L} is -B³-L^{L1}-B³—, wherein B³ is —C(O)—; and L^{L1} is C₁₋₁₀alkyl.

[2042] In certain embodiments, where R^{T} is R^{T1}, wherein R^{T1} is -L^{L}-oligonucleotide, when L^{L} connects to a oxygen atom on a nucleoside, and L L⁵ is a bond, the nucleoside is of Formula (XV-f),

[chemical structure]

wherein B is an optionally modified nucleobase (e.g., adenine, cytosine, uracil, guanine, 5-methylcytosine, or -5-methyluracil); L¹ is according any of the preceding embodiments; and * represent the bond to ZZ.

[2043] In some embodiments of Formula (XV-f), -T- is -L¹-G-L³-*, wherein * is the bond to ZZ.

[2044] In some embodiments, -T- is —C₂₋₃₀alkyl-*, wherein the alkyl is optionally substituted with one or two R groups, and * is the bond to ZZ. In some embodiments, -T- is —C₂₋₃₀alkyl-*, wherein the alkyl is optionally substituted with one or two groups selected from the group consisting of halogen, hydroxy, C₁₋₆alkoxy, amino, C₁₋₆alkylamino, di(C₁₋₆alkylamino), cyano, carboxy, and * is the bond to ZZ. In some embodiments, -T- is —C₂₋₃₀alkyl-*, wherein the alkyl is optionally substituted with one group selected from the group consisting of halogen, hydroxy, C₁₋₆alkoxy, amino, C₁₋₆alkylamino, di(C₁₋₆ alkylamino), cyano, carboxy, and * is the bond to ZZ. In some embodiments, -T- is —C₂₋₃₀alkyl-*, wherein the alkyl is optionally substituted with one group selected from the group consisting of hydroxy, amino, and carboxy, and * is the bond to ZZ. In some embodiments, -T- is —C₂₋₃₀alkyl-*, wherein the alkyl is optionally substituted with hydroxy, and * is the bond to ZZ.

[2045] In some embodiments, -T- is —C₂₋₃₀alkyl-*, wherein * is the bond to ZZ. In some embodiments, -T- is —C₂₋₁₀alkyl-*, wherein * is the bond to ZZ. In some embodiments, -T- is —C₄₋₁₂alkyl-*, wherein * is the bond to ZZ. In some embodiments, -T- is —C₄₋₁₀alkyl-*, wherein * is the bond to ZZ. In some embodiments, -T- is —C₅₋₁₀alkyl-*, wherein * is the bond to ZZ. In some embodiments, -T- is —C₆alkyl-*, wherein * is the bond to ZZ. In some embodiments, -T- is —C₈alkyl-*, wherein * is the bond to ZZ. In some embodiments, -T- is —C₁₀alkyl-*, wherein * is the bond to ZZ.

[2046] In some embodiments of Formula (XV-f), -T- is -L¹-[G-L²]_{q}-G-L³-*, wherein
[2047] * is the bond to ZZ;
[2048] q is 0, 1, 2, 3, 4, or 5;
[2049] L¹ is a bond or -B-A-;
[2050] each L² is independently -A-B-A-;
[2051] L³ is a bond or -A-B-A-;
[2052] each A is independently a bond, —O—, —S—, or —N(R^{N})—;
[2053] each B is independently a bond, CH₂, C(O), C(S), C(NR^{N}), S(O)₂, P(O)(OH), or P(S)(OH);
[2054] each R^{N} is independently hydrogen or C₁₋₆alkyl; and
[2055] each G is independently C₁₋₁₀alkyl, C₂₋₁₀alkenyl, C₂₋₁₀alkynyl, each of which is optionally substituted with 1, 2, 3, or 4 R groups.

[2056] In some embodiments, -T- is -L¹-[G-L²]_{q}-G-*, wherein * is the bond to ZZ, q is 0, 1, 2, or 3; L¹ is a bond or -B-A-; and
[2057] (c) each L² is independently a bond, C(O)O, OC(O), C(O)(NR^{N}), N(R^{N})C(O), SO₂N(R^{N}), N(R^{N})SO₂, OP(O)(OH), OP(S)(OH), P(O)(OH)O, P(S)(OH)O, OP(O)(OH)O, or OP(S)(OH)O, wherein each R^{N} is independently hydrogen or C₁₋₆alkyl; each G is independently C₁₋₁₀alkyl, C₂₋₁₀alkenyl, C₂₋₁₀alkynyl, each of which is optionally substituted with 1 or 2 R groups;
[2058] or
[2059] (d) each L² is independently a bond, C(O)O, OC(O), C(O)(NR^{N}), N(R^{N})C(O), OP(O)(OH)O, or OP(S)(OH)O, wherein each R^{N} is independently hydrogen or C₁₋₆alkyl; and each G is independently C₁₋₁₀alkyl or C₂₋₁₀alkenyl, each of which is optionally substituted with 1 or 2 R groups.

[2060] In some embodiments, -T- is -[G-L²]_{q}-G-*, wherein * is the bond to ZZ, q is 0, 1, 2, or 3 (e.g., q is 0, 1, or 2; or 0 or 1; or 0; or 1; or 2); each G is independently C₁₋₁₀alkyl, each of which is optionally substituted with 1 or 2 R groups. and
[2061] (e) each L² is independently C(O)O or OC(O);
[2062] (f) each L² is independently C(O)(NR^{N}) or N(R^{N})C(O), wherein each R^{N} is independently hydrogen or C₁₋₆alkyl
[2063] (g) each L² is independently OP(O)(OH)O, or OP(S)(OH)O (e.g., each is OP(O)(OH)O);
[2064] or
[2065] (h) each L² is a bond.

[2066] In some embodiments, the compound of Formula (XV) is according to one of Formulae (XV-g) through (XV-q):

[chemical structure]

wherein
[2067] B is an optionally modified nucleobase (e.g., adenine, cytosine, uracil, guanine, 5-methylcytosine, or -5-methyluracil);
[2068] each n is independently 0 or an integer selected from 1-10; (e.g., 1-5, or 1-3, or 3, or 2, or 1);
[2069] each m is independently integer selected from 1-20 (e.g., 2-12, or 2-10; or 2-6; or 2; or 3; or 4; or 5; or 6).

[2070] In some embodiments, the compound of Formula (XV) is according to one of Formulae (XV-r) through (XV-w):

[chemical structure]

[chemical structure]

[chemical structure]

or a salt thereof, wherein
[2071] L and ZZ are as defined in Formula (XV) or in any embodiment preceding or below;
[2072] B is an optionally modified nucleobase (e.g., adenine, cytosine, uracil, guanine, 5-methylcytosine, or -5-methyluracil);
[2073] each m is independently integer selected from 1-20 (e.g., 2-12, or 2-10; or 2-6; or 2; or 3; or 4; or 5; or 6);
[2074] R^{P} is hydrogen or a nitrogen protecting group (e.g., a nitrogen protecting group); and
[2075] R¹ is hydrogen or C₁₋₆alkyl (e.g., methyl ort-butyl).

[2076] In one embodiment of Formulae (XV-r) through (XV-w), R¹ is hydrogen. In another embodiment of Formulae (XV-r) through (XV-w), R¹ is C₁₋₆alkyl (e.g., methyl or t-butyl). In another embodiment of Formulae (XV-r) through (XV-w), R¹ is hydrogen and R^{P} is hydrogen. In another embodiment of Formulae (XV-r) through (XV-w), R¹ is hydrogen and a nitrogen protecting group. In another embodiment of Formulae (XV-r) through (XV-w), R¹ is C₁₋₆alkyl (e.g., methyl or t-butyl) and R^{P} is hydrogen. In another embodiment of Formulae (XV-r) through (XV-w), R¹ is C₁₋₆alkyl (e.g., methyl or t-butyl) and a nitrogen protecting group.

[2077] In certain embodiments, where R^{T} is R^{T1}, wherein R^{T1} is -L^{L}-oligonucleotide, when L^{L} connects to a oxygen atom or nitrogen atom in an internucleotide linkage, the internucleotide linkage can be of the formula, including the 3′ and 5′ oxygen atoms of the preceding and following nucleosides, respectively,

[chemical structure]

wherein L′ can be, for example a bond, —S(O)₂— or, in for Formula (XV-i), a 5-8 membered heterocyclyl ring optionally substituted with 1 or 2 R groups, as defined herein; and * represent the bond to Δ.

[2078] For example, the preceding includes,

[chemical structure]

wherein * represent the bond to Δ; and R^{N5} is hydrogen or C₁₋₁₀ alkyl.

[2079] For example, the preceding includes,

[chemical structure]

wherein * represent the bond to Δ; m is an integer selected from 1-20 (e.g., 1-10, or 2-20, or 2-10, or 4-10, or 4-8; or 6-12; or 5; or 6; or 7; or 8; or 9; or 10), and R^{N5} is hydrogen or C₁₋₁₀ alkyl.

[2080] In another embodiment, the compound of Formula (XV-pd) is

[chemical structure]

wherein Y′ is O or S, and R^{Y}, Y, R¹, L, T, Δ, and ZZ are as defined for Formula (XV). In one embodiment, R¹ is hydrogen. In another embodiment, R¹ is C₁₋₆alkyl (e.g., methyl or t-butyl).

[2081] In another embodiment, the compound is

[chemical structure]

[chemical structure]

wherein Y′ is O or S, and R¹, T, Δ, R^{P}, L, and ZZ are as defined for Formula (XV).

[2082] In another embodiment, the compound is

[chemical structure]

[chemical structure]

[chemical structure]

wherein each m is an integer selected from 1-20 (e.g., 2-20, 2-10, 1-10, 2-16, 4-16, 4-8, or 6-12), Y′ is O or S, and R¹, Δ, R^{P} and ZZ are as defined for Formula (XV).

[2083] In another embodiment, the compound of Formula (XV-pe) is

[chemical structure]

[2084] wherein Y′ is O or S, and R^{Y}, Y, R¹, L, T, Δ, and ZZ are as defined for Formula (XV). In one embodiment, Y′ is O. In another embodiment, Y′ is S.

[2085] In one embodiment, R¹ is hydrogen. In another embodiment, R¹ is C₁₋₆alkyl (e.g., methyl or t-butyl).

[2086] In one embodiment, R^{P} is hydrogen. In another embodiment, R^{P} is a nitrogen protecting group (e.g., t-butoxycarbonyl (Boc), benzyloxycarbonyl (Cbz) or phenoxyacetyl (pac)).

[2087] In one embodiment, Y′ is O and R¹ is hydrogen. In one embodiment, Y′ is O and R¹ is C₁₋₆ alkyl (e.g., methyl or t-butyl). In one embodiment, Y′ is S and R¹ is hydrogen. In one embodiment, Y′ is S and R¹ is C₁₋₆alkyl (e.g., methyl ort-butyl).

[2088] In one embodiment, Y′ is O and R^{P} is hydrogen. In one embodiment, Y′ is O and R^{P} is a nitrogen protecting group (e.g., t-butoxycarbonyl (Boc), benzyloxycarbonyl (Cbz) or phenoxyacetyl (pac)). In one embodiment, Y′ is S and R^{P} is hydrogen. In one embodiment, Y′ is S and R^{P} is a nitrogen protecting group (e.g., t-butoxycarbonyl (Boc), benzyloxycarbonyl (Cbz) or phenoxyacetyl (pac)).

[2089] In one embodiment, Y′ is O, R¹ is hydrogen and R^{P} is hydrogen. In one embodiment, Y′ is S, R¹ is hydrogen and R^{P} is hydrogen. In one embodiment, Y′ is O, R¹ is hydrogen and R^{P} is a nitrogen protecting group (e.g., t-butoxycarbonyl (Boc), benzyloxycarbonyl (Cbz) or phenoxyacetyl (pac)). In one embodiment, Y′ is S, R¹ is hydrogen and R^{P} is a nitrogen protecting group (e.g., t-butoxycarbonyl (Boc), benzyloxycarbonyl (Cbz) or phenoxyacetyl (pac)). In one embodiment, Y′ is O, R¹ is C₁₋₆alkyl (e.g., methyl or t-butyl) and R^{P} is hydrogen. In one embodiment, Y′ is S, R¹ is C₁₋₆alkyl (e.g., methyl or t-butyl) and R^{P} is hydrogen. In one embodiment, Y′ is O, R¹ is C₁₋₆alkyl (e.g., methyl or t-butyl) and R^{P} is a nitrogen protecting group (e.g., t-butoxycarbonyl (Boc), benzyloxycarbonyl (Cbz) or phenoxyacetyl (pac)). In one embodiment, Y′ is S, R¹ is C₁₋₆alkyl (e.g., methyl or t-butyl) and R^{P} is a nitrogen protecting group (e.g., t-butoxycarbonyl (Boc), benzyloxycarbonyl (Cbz) or phenoxyacetyl (pac)).

[2090] In another embodiment, the compound is

[chemical structure]

[chemical structure]

[2091] wherein Y′ is O or S, and R¹, L, T, Δ, R^{P}, and ZZ are as defined for Formula (XV). In one embodiment, Y′ is O. In another embodiment, Y′ is S.

[2092] In one embodiment, R¹ is hydrogen. In another embodiment, R¹ is C₁₋₆alkyl (e.g., methyl or t-butyl).

[2093] In one embodiment, R^{P} is hydrogen. In another embodiment, R^{P} is a nitrogen protecting group (e.g., t-butoxycarbonyl (Boc), benzyloxycarbonyl (Cbz) or phenoxyacetyl (pac)).

[2094] In one embodiment, Y′ is O and R¹ is hydrogen. In one embodiment, Y′ is O and R¹ is C₁₋₆ alkyl (e.g., methyl or t-butyl). In one embodiment, Y′ is S and R¹ is hydrogen. In one embodiment, Y′ is S and R¹ is C₁₋₆alkyl (e.g., methyl ort-butyl).

[2095] In one embodiment, Y′ is O and R^{P} is hydrogen. In one embodiment, Y′ is O and R^{P} is a nitrogen protecting group (e.g., t-butoxycarbonyl (Boc), benzyloxycarbonyl (Cbz) or phenoxyacetyl (pac)). In one embodiment, Y′ is S and R^{P} is hydrogen. In one embodiment, Y′ is S and R^{P} is a nitrogen protecting group (e.g., t-butoxycarbonyl (Boc), benzyloxycarbonyl (Cbz) or phenoxyacetyl (pac)).

[2096] In one embodiment, Y′ is O, R¹ is hydrogen and R^{P} is hydrogen. In one embodiment, Y′ is S, R¹ is hydrogen and R^{P} is hydrogen. In one embodiment, Y′ is O, R¹ is hydrogen and R^{P} is a nitrogen protecting group (e.g., t-butoxycarbonyl (Boc), benzyloxycarbonyl (Cbz) or phenoxyacetyl (pac)). In one embodiment, Y′ is S, R¹ is hydrogen and R^{P} is a nitrogen protecting group (e.g., t-butoxycarbonyl (Boc), benzyloxycarbonyl (Cbz) or phenoxyacetyl (pac)). In one embodiment, Y′ is O, R¹ is C₁₋₆alkyl (e.g., methyl or t-butyl) and R^{P} is hydrogen. In one embodiment, Y′ is S, R¹ is C₁₋₆alkyl (e.g., methyl or t-butyl) and R^{P} is hydrogen. In one embodiment, Y′ is O, R¹ is C₁₋₆alkyl (e.g., methyl or t-butyl) and R^{P} is a nitrogen protecting group (e.g., t-butoxycarbonyl (Boc), benzyloxycarbonyl (Cbz) or phenoxyacetyl (pac)). In one embodiment, Y′ is S, R¹ is C₁₋₆alkyl (e.g., methyl or t-butyl) and R^{P} is a nitrogen protecting group (e.g., t-butoxycarbonyl (Boc), benzyloxycarbonyl (Cbz) or phenoxyacetyl (pac)).

[2097] In another embodiment, the compound is

[chemical structure]

[chemical structure]

wherein each m is an integer selected from 1-20 (e.g., 2-20, 2-10, 1-10, 2-16, 4-16, 4-8, or 6-12), Y′ is O or S, and R¹, Δ, R^{P}, and ZZ are as defined for Formula (XV).

[2098] In one embodiment, Y′ is O. In another embodiment, Y′ is S.

[2099] In one embodiment, R¹ is hydrogen. In another embodiment, R¹ is C₁₋₆alkyl (e.g., methyl or t-butyl).

[2100] In one embodiment, R^{P} is hydrogen. In another embodiment, R^{P} is a nitrogen protecting group (e.g., t-butoxycarbonyl (Boc), benzyloxycarbonyl (Cbz) or phenoxyacetyl (pac)).

[2101] In one embodiment, Y′ is O and R¹ is hydrogen. In one embodiment, Y′ is O and R¹ is C₁₋₆ alkyl (e.g., methyl or t-butyl). In one embodiment, Y′ is S and R¹ is hydrogen. In one embodiment, Y′ is S and R¹ is C₁₋₆alkyl (e.g., methyl ort-butyl).

[2102] In one embodiment, Y′ is O and R^{P} is hydrogen. In one embodiment, Y′ is O and R^{P} is a nitrogen protecting group (e.g., t-butoxycarbonyl (Boc), benzyloxycarbonyl (Cbz) or phenoxyacetyl (pac)). In one embodiment, Y′ is S and R^{P} is hydrogen. In one embodiment, Y′ is S and R^{P} is a nitrogen protecting group (e.g., t-butoxycarbonyl (Boc), benzyloxycarbonyl (Cbz) or phenoxyacetyl (pac)).

[2103] In one embodiment, Y′ is O, R¹ is hydrogen and R^{P} is hydrogen. In one embodiment, Y′ is S, R¹ is hydrogen and R^{P} is hydrogen. In one embodiment, Y′ is O, R¹ is hydrogen and R^{P} is a nitrogen protecting group (e.g., t-butoxycarbonyl (Boc), benzyloxycarbonyl (Cbz) or phenoxyacetyl (pac)). In one embodiment, Y′ is S, R¹ is hydrogen and R^{P} is a nitrogen protecting group (e.g., t-butoxycarbonyl (Boc), benzyloxycarbonyl (Cbz) or phenoxyacetyl (pac)). In one embodiment, Y′ is O, R¹ is C₁₋₆alkyl (e.g., methyl or t-butyl) and R^{P} is hydrogen. In one embodiment, Y′ is S, R¹ is C₁₋₆alkyl (e.g., methyl or t-butyl) and R^{P} is hydrogen. In one embodiment, Y′ is O, R¹ is C₁₋₆alkyl (e.g., methyl or t-butyl) and R^{P} is a nitrogen protecting group (e.g., t-butoxycarbonyl (Boc), benzyloxycarbonyl (Cbz) or phenoxyacetyl (pac)). In one embodiment, Y′ is S, R¹ is C₁₋₆alkyl (e.g., methyl or t-butyl) and R^{P} is a nitrogen protecting group (e.g., t-butoxycarbonyl (Boc), benzyloxycarbonyl (Cbz) or phenoxyacetyl (pac)).

[2104] In another embodiment, when L^{L} connects to a oxygen atom on a nucleoside, then L^{L} is—a bond.

[2105] For Formula (XV), when R^{T1} is -L^{L}-oligonucleotide and is conjugated at the 5′-end of the oligonucleotide, in one embodiment, R^{T1} can be represented as Formula (XV-5′)

[chemical structure]

wherein L^{L} is —P(Y)(OH)—, wherein Y is O or S (e.g., S); and * represents the bond to remainder of the compound of Formula (XV).

[2106] In another embodiment of Formula (XV), when R^{T1} is -L^{L}-oligonucleotide and is conjugated at the 5′-end of the oligonucleotide, in one embodiment, R^{T1} can be represented as Formula (XV-5′o) or Formula (XV-5's),

[chemical structure]

wherein * represents the bond to remainder of the compound of Formula (XV).

[2107] In another embodiment, a compound of Formula (XV) can be represented by,

[chemical structure]

wherein Y′ is O or S, x is an integer selected from 2 to 8, and Δ, R^{Y}, Y, R¹, L, T, and ZZ are as defined for Formula (XV) or any embodiment thereof.

[2108] For Formula (XV), when R^{T1} is -L^{L}-oligonucleotide and is conjugated at the 3′-end of the oligonucleotide, in one embodiment, R^{T1} can be represented as Formula (XV-3′)

[chemical structure]

wherein L^{L} is —P(Y)(OH)—, wherein Y is O or S (e.g., S); and * represents the bond to remainder of the compound of Formula (XV).

[2109] In another embodiment of Formula (XV), when R^{T1} is -L^{L}-oligonucleotide and is conjugated at the 3′-end of the oligonucleotide, in one embodiment, R^{T1} can be represented as Formula (XV-3′o) or Formula (XV-3's),

[chemical structure]

wherein * represents the bond to remainder of the compound of Formula (XV).

[2110] In another embodiment, a compound of Formula (XV) can be represented by,

[chemical structure]

wherein Y′ is O or S, x is an integer selected from 2 to 8, and Δ, R^{Y}, Y, R¹, L, T, and ZZ are as defined for Formula (XV) or any embodiment thereof. In one embodiment, R¹ is hydrogen. In another embodiment, R¹ is C₁₋₆alkyl (e.g., methyl or t-butyl).

[2111] In another embodiment, the compound of Formula (XV) is

[chemical structure]

[2112] wherein Y′ is O or S;
[2113] each ZZ is N(H)C(O) or C(O)N(H);
[2114] each Φ is

[chemical structure]

wherein m is an integer selected from 1-10;
   [2115] L⁴ and L⁶ are independently -B¹-A¹- or -A¹-B¹-;
   [2116] each L⁵ is a bond or -A¹-B¹-A¹- (e.g., a bond, -B¹-A¹- or -A¹-B¹-; or a bond);
   [2117] each G¹ is independently C₁₋₁₀alkyl or C₂₋₁₀alkenyl;
   [2118] each A¹ is independently a bond, —O—, —S—, or —N(R^{N1})—, wherein R^{N1} is independently hydrogen or C₁₋₆alkyl; and
   [2119] each B¹ is independently a bond, C(O), C(S), S(O)₂, P(O)(OH), or P(S)(OH).

[2120] In another embodiment of Formula (XV-x), each Φ is

[chemical structure]

wherein m is an integer selected from 1-10.

[2121] In another embodiment of Formula (XV-x), each Φ is

[chemical structure]

wherein m is an integer selected from 1-10;

[2122] In another embodiment of Formula (XV-x), each Φ is

[chemical structure]

wherein m is an integer selected from 1-10;

[2123] In another embodiment of Formula (XV-x), each Φ is

[chemical structure]

wherein m is an integer selected from 1-10.

[2124] In another embodiment of Formula (XV-x), each Φ is

[chemical structure]

wherein m is an integer selected from 1-10;

[2125] In another embodiment of Formula (XV-x) and each of the preceding embodiments thereof,
[2126] L⁴ and L⁶ are independently -B¹-A¹- or -A¹-B¹-;
[2127] L⁵ is a bond, -B¹-A¹- or -A¹-B¹-;
[2128] each G¹ is independently C₁₋₁₀alkyl;
[2129] each A¹ is independently a bond, —O—, —S—, or —N(R^{N1})—, wherein R^{N1} is independently hydrogen or C₁₋₆alkyl; and
[2130] each B¹ is independently a bond, C(O), C(S), S(O)₂, P(O)(OH), or P(S)(OH).

[2131] In another embodiment of Formula (XV-x) and each of the preceding embodiments thereof,
[2132] L⁴ is -B¹-A¹- or -A¹-B¹-;
[2133] L⁶ is B¹;
[2134] L⁵ is a bond, -B¹-A¹- or -A¹-B¹-;
[2135] each G¹ is independently C₁₋₁₀alkyl;
[2136] each A¹ is independently —O— or —N(H)—, and
[2137] each B¹ is independently C(O), S(O)₂, P(O)(OH), or P(S)(OH).

[2138] In another embodiment of Formula (XV-x) and each of the preceding embodiments thereof,
[2139] -L⁴-G¹-L⁵-G¹-L⁴- is -B¹-C₁₋₁₀alkyl-L⁵-C₁₋₁₀alkyl-B¹-A¹-
[2140] L⁵ is a bond, -B¹-A¹- or -A¹-B¹-;
[2141] each A¹ is independently —O— or —N(H)—, and
[2142] each B¹ is independently C(O), S(O)₂, P(O)(OH), or P(S)(OH).

[2143] In another embodiment of Formula (XV-x) and each of the preceding embodiments thereof,
[2144] -L⁴-G¹-L⁵-G¹-L⁴- is —C(O)—C₁₋₁₀alkyl-L⁵-C₁₋₁₀alkyl-C(O)N(H)—, wherein L⁵ is a bond, -B¹-A¹- or -A¹-B¹-, wherein A¹ is —O— or —N(H)—, and B¹ is C(O), S(O)₂, P(O)(OH), or P(S)(OH).

[2145] In another embodiment of Formula (XV-x) and each of the preceding embodiments thereof,
[2146] -L⁴-G¹-L⁵-G¹-L⁴- is —C(O)—C₂₋₂₀alkyl-C(O)N(H)— (e.g., —C(O)—C₆₋₁₂alkyl-C(O)N(H)—, or —C(O)—C₈₋₁₂alkyl-C(O)N(H)—, or —C(O)—C₁₀alkyl-C(O)N(H)—).

[2147] In another embodiment, the compound of Formula (XV) is

[chemical structure]

[2148] wherein Y′ is O or S;
[2149] each ZZ is N(H)C(O) or C(O)N(H);
   each Φ is

[chemical structure]

wherein m is an integer selected from 1-10;
[2150] L⁵ is a bond or -A¹-B¹-A¹- (e.g., a bond, -B¹-A¹- or -A¹-B¹-; or a bond);
[2151] each G¹ is independently C₁₋₁₀alkyl;
[2152] each A¹ is independently a bond, —O—, —S—, or —N(R^{N1})—, wherein R^{N1} is independently hydrogen or C₁₋₆alkyl; and
[2153] each B¹ is independently a bond, C(O), C(S), S(O)₂, P(O)(OH), or P(S)(OH).
   In another embodiment of Formula (XV-x1), each Φ is

[chemical structure]

wherein m is an integer selected from 1-10.
In another embodiment of Formula (XV-x1), each Φ is

[chemical structure]

wherein m is an integer selected from 1-10;
In another embodiment of Formula (XV-x1), each Φ is

[chemical structure]

wherein m is an integer selected from 1-10;
In another embodiment of Formula (XV-x1), each Φ is

[chemical structure]

wherein m is an integer selected from 1-10.

[2154] In another embodiment of Formula (XV-x1), each Φ is

[chemical structure]

wherein m is an integer selected from 1-10;

[2155] In another embodiment, the compound of Formula (XV) is

[chemical structure]

[2156] wherein Y′ is O or S;
[2157] each ZZ is N(H)C(O) or C(O)N(H);
   each Φ is

[chemical structure]

wherein m is an integer selected from 1-10;
[2158] L⁵ is a bond or -A¹-B¹-A¹- (e.g., a bond, -B¹-A¹- or -A¹-B¹-; or a bond);
[2159] each G¹ is independently C₁₋₁₀alkyl;
[2160] each A¹ is independently a bond, —O—, —S—, or —N(R^{N1})—, wherein R^{N1} is independently hydrogen or C₁₋₆alkyl; and
[2161] each B¹ is independently a bond, C(O), C(S), S(O)₂, P(O)(OH), or P(S)(OH).
   In another embodiment of Formula (XV-x2), each Φ is

[chemical structure]

wherein m is an integer selected from 1-10.
In another embodiment of Formula (XV-x2), each Φ is

[chemical structure]

wherein m is an integer selected from 1-10;
In another embodiment of Formula (XV-x2), each Φ is

[chemical structure]

wherein m is an integer selected from 1-10;
In another embodiment of Formula (XV-x2), each Φ is

[chemical structure]

wherein m is an integer selected from 1-10.
In another embodiment of Formula (XV-x2), each Φ is

[chemical structure]

wherein m is an integer selected from 1-10;

[2162] In one embodiment of Formula (XV-x), (XV-x1), and (XV-x2), and each of the preceding embodiments thereof, Y′ is O. In another embodiment, Y′ is S.

[2163] In one embodiment of Formula (XV-x), (XV-x1), and (XV-x2), and each of the preceding embodiments thereof, R¹ is hydrogen. In another embodiment, R¹ is C₁₋₆alkyl (e.g., methyl or t-butyl).

[2164] In one embodiment of Formula (XV-x), (XV-x1), and (XV-x2), and each of the preceding embodiments thereof, R^{P} is hydrogen. In another embodiment, R^{P} is a nitrogen protecting group (e.g., t-butoxycarbonyl (Boc), benzyloxycarbonyl (Cbz) or phenoxyacetyl (pac)).

[2165] In one embodiment of Formula (XV-x), (XV-x1), and (XV-x2), and each of the preceding embodiments thereof, Y′ is O and R¹ is hydrogen. In one embodiment, Y′ is O and R¹ is C₁₋₆alkyl (e.g., methyl or t-butyl). In one embodiment, Y′ is S and R¹ is hydrogen. In one embodiment, Y′ is S and R¹ is C₁₋₆alkyl (e.g., methyl ort-butyl).

[2166] In one embodiment of Formula (XV-x), (XV-x1), and (XV-x2), and each of the preceding embodiments thereof, Y′ is O and R^{P} is hydrogen. In one embodiment, Y′ is O and R^{P} is a nitrogen protecting group (e.g., t-butoxycarbonyl (Boc), benzyloxycarbonyl (Cbz) or phenoxyacetyl (pac)). In one embodiment, Y′ is S and R^{P} is hydrogen. In one embodiment, Y′ is S and R^{P} is a nitrogen protecting group (e.g., t-butoxycarbonyl (Boc), benzyloxycarbonyl (Cbz) or phenoxyacetyl (pac)).

[2167] In one embodiment of Formula (XV-x), (XV-x1), and (XV-x2), and each of the preceding embodiments thereof, Y′ is O, R¹ is hydrogen and R^{P} is hydrogen. In one embodiment, Y′ is S, R¹ is hydrogen and R^{P} is hydrogen. In one embodiment, Y′ is O, R¹ is hydrogen and R^{P} is a nitrogen protecting group (e.g., t-butoxycarbonyl (Boc), benzyloxycarbonyl (Cbz) or phenoxyacetyl (pac)). In one embodiment, Y′ is S, R¹ is hydrogen and R^{P} is a nitrogen protecting group (e.g., t-butoxycarbonyl (Boc), benzyloxycarbonyl (Cbz) or phenoxyacetyl (pac)). In one embodiment, Y′ is O, R¹ is C₁₋₆alkyl (e.g., methyl or t-butyl) and R^{P} is hydrogen. In one embodiment, Y′ is S, R¹ is C₁₋₆alkyl (e.g., methyl or t-butyl) and R^{P} is hydrogen. In one embodiment, Y′ is O, R¹ is C₁₋₆alkyl (e.g., methyl or t-butyl) and R^{P} is a nitrogen protecting group (e.g., t-butoxycarbonyl (Boc), benzyloxycarbonyl (Cbz) or phenoxyacetyl (pac)). In one embodiment, Y′ is S, R¹ is C₁₋₆alkyl (e.g., methyl or t-butyl) and R^{P} is a nitrogen protecting group (e.g., t-butoxycarbonyl (Boc), benzyloxycarbonyl (Cbz) or phenoxyacetyl (pac)).

[2168] In other embodiments of Formula (XV), the compound is of the structure:

[chemical structure]

[chemical structure]

### R^{T1}, Phosphorous Coupling Groups

[2169] In another embodiment, R^{P3}, when present, is a hydroxyl protecting group (e.g., according to any one of the preceding embodiments of R^{P3}) and R^{T1} is phosphorous coupling group

[2170] In another embodiment, R^{P3}, when present, is a hydroxyl protecting group (e.g., according to any one of the preceding embodiments of R^{P3}) and R^{T1} is phosphorous coupling group of the formula —P(Z)(XV), wherein:
[2171] X is selected from the group consisting of
[2172] C₁₋₆alkyl (e.g., methyl),
[2173] C₁₋₆alkoxyC₁₋₆alkyl (e.g., 3-methoxypropyl),
[2174] C₁₋₆alkoxy (e.g., —OCH₃, —OCH₂CH₃, —OCH₂CH₂CH₃, —OCH₂CH(CH₃)₂),
[2175] C₁₋₆alkoxy substituted with R (e.g., —OCH₂CH₂CN, —OCH₂CH₂Si(CH₃)₃, —OCH₂CH₂Si(CH₂CH₃)₃

[chemical structure]

[2176] C₂₋₆alkenyloxy (e.g., —OC(H)═CH₂, —OCH₂C(H)═CH₂),
[2177] phenoxy optionally substituted with 1, 2, 3, or 4 R groups.

[chemical structure]

benzyloxy optionally substituted with 1, 2, 3, or 4 R groups. (e.g.,

[chemical structure]

and
[2178] Z is selected from the group consisting of
   [2179] di(C₁₋₆alkyl)amino

[chemical structure]

and
[2180] heterocyclyl optionally substituted with 1, 2, 3, or 4 R groups.

[chemical structure]

or
[2181] X and Z taken together with the phosphorus atom to which they are attached form a cyclic monocyclic or bicyclic heterocyclyl group that is optionally substituted with 1, 2, 3, or 4 R groups.

[2182] In another embodiment, R^{P3}, when present, is a hydroxyl protecting group (e.g., according to any one of the preceding embodiments of R^{P3}) and R^{T1} is phosphorous coupling group of the formula,

[chemical structure]

[chemical structure]

[2183] In another embodiment, R^{P3}, when present, is a hydroxyl protecting group (e.g., according to any one of the preceeding embodiments of R^{P3}) and R^{T1} is

[chemical structure]

[2184] In another embodiment, R^{P3}, when present, is a hydroxyl protecting group (e.g., according to any one of the preceding embodiments of R^{P3}) and R^{T1} is phosphorous coupling group of the formula

[chemical structure]

or a salt thereof, wherein Y is O or S; and R^{T2} is hydrogen or —C(O)C₁₋₆alkyl.

[2185] In another embodiment, R^{P3}, when present, is a hydroxyl protecting group (e.g., according to any one of the preceding embodiments of R^{P3}) and R^{T1} is phosphorous coupling group of the formula

[chemical structure]

or a salt thereof.

### Solid Supports

[2186] In another embodiment, R^{P3}, when present, is a hydroxyl protecting group (e.g., according to any one of the preceding embodiments of R^{P3}) and R^{T1} is -L^{K}-S^{S}, wherein L^{K} is a support linking group and SS is a solid support, —OR^{SS} or —N(R^{SS})₂, or hydrogen, wherein each R^{SS} is independently hydrogen or C₁₋₆alkyl.

[2187] In another embodiment, R^{P3}, when present, is a hydroxyl protecting group (e.g., according to any one of the preceding embodiments of R^{P3}) and R^{T1} is -L^{K}-S^{S}, wherein L^{K} is a support linking group and S^{S} is —OR^{SS} or —N(R^{SS})₂.

[2188] In another embodiment, R^{P3}, when present, is a hydroxyl protecting group (e.g., according to any one of the preceding embodiments of R^{P3}) and R^{T1} is -L^{K}-S^{S}, wherein L^{K} is a support linking group of the formula: —C(O)(CH₂)ₙC(O)—, wherein n is 1-20; and S^{S} is —OR^{SS} (e.g., —OH).

[2189] In another embodiment, R^{P3}, when present, is a hydroxyl protecting group (e.g., according to any one of the preceding embodiments of R^{P3}) and R^{T1} is -L^{K}-S^{S}, wherein L^{K} is a support linking group of the formula: —C(O)CH₂CH₂C(O)—, wherein n is 1-20; and S^{S} is —OR^{SS} (e.g., —OH).

[2190] In another embodiment, R^{P3}, when present, is a hydroxyl protecting group (e.g., according to any one of the preceding embodiments of R^{P3}) and R^{T1} is -L^{K}-S^{S}, wherein S^{S} is a solid support.

[2191] In another embodiment, R^{P3}, when present, is a hydroxyl protecting group (e.g., according to any one of the preceding embodiments of R^{P3}) and R^{T1} is -L^{K}-S^{S}, wherein S^{S} is a controlled pore glass (CPG),

[2192] In another embodiment, R^{P3}, when present, is a hydroxyl protecting group (e.g., according to any one of the preceding embodiments of R^{P3}) and R^{T1} is -L^{K}-S^{S}, wherein S^{S} is a polystyrene (e.g., cross-linked polystyrene).

[2193] In an embodiment of each of the preceding, L^{K} is

[chemical structure]

wherein q is 0 or an integer selected from 1-20. In an embodiment of each of the preceding, L^{K} is

[chemical structure]

[2194] In an embodiment of each of the preceding, L^{K} is

[chemical structure]

wherein q is 0 or an integer selected from 1-20, and * represents the bond to SS (i.e. to a functional group on the surface of S^{S}).

[2195] In an embodiment of each of the preceding, R^{P3}, when present, is a hydroxyl protecting group (e.g., according to any one of the preceding embodiments of R^{P3}) and R^{T1} is

[chemical structure]

where [symbol] is the solid support.

[2196] In an embodiment of each of the preceding, R^{P3}, when present, is a hydroxyl protecting group (e.g. according to any one of the preceding embodiments of R^{P3}) and R^{T1} is

[chemical structure]

wherein [symbol] is the solid support.

[2197] In an embodiment of each of the preceding, R^{P3}, when present, is a hydroxyl protecting group (e.g., according to any one of the preceding embodiments of R^{P3}) and R^{T1} is

[chemical structure]

[2198] In another embodiment, the compound of Formula (XV) is

[chemical structure]

wherein [symbol] represents a solid support; Q is O or NH, and Δ, R^{Y}, Y, R¹, L, T, and ZZ are as defined for Formula (XV) or any embodiment thereof. In one embodiment, R¹ is hydrogen. In another embodiment, R¹ is C₁₋₆alkyl (e.g., methyl or t-butyl). In one embodiment, R^{P3} is hydrogen. In another embodiment, R^{P3} is hydroxyl protecting group (e.g., 4,4′-dimethyoxytrityl (DMTr)).

[2199] In another embodiment, the compound of Formula (XV) is

[chemical structure]

[2200] wherein [symbol] represents a solid support; Q is O or NH,
[2201] each ZZ is N(H)C(O) or C(O)N(H);
   each Φ is

[chemical structure]

wherein m is an integer selected from 1-10;
[2202] L⁴ and L⁶ are independently -B¹-A¹- or -A¹-B¹-;
[2203] each L⁵ is a bond or -A¹-B¹-A¹- (e.g., a bond, -B¹-A¹- or -A¹-B¹-; or a bond);
[2204] each G¹ is independently C₁₋₁₀alkyl or C₂₋₁₀alkenyl;
[2205] each A¹ is independently a bond, —O—, —S—, or —N(R^{N1})—, wherein R^{N1} is independently hydrogen or C₁₋₆alkyl; and
[2206] each B¹ is independently a bond, C(O), C(S), S(O)₂, P(O)(OH), or P(S)(OH).
   In another embodiment of Formula (XV-z), each Φ is

[chemical structure]

wherein m is an integer selected from 1-10.
In another embodiment of Formula (XV-z), each Φ is

[chemical structure]

wherein m is an integer selected from 1-10;
In another embodiment of Formula (XV-z), each Φ is

[chemical structure]

wherein m is an integer selected from 1-10;
In another embodiment of Formula (XV-z), each Φ is

[chemical structure]

wherein m is an integer selected from 1-10;
In another embodiment of Formula (XV-z), each Φ is

[chemical structure]

wherein m is an integer selected from 1-10;

[2207] In another embodiment of Formula (XV-z) and each of the preceding embodiments thereof,
[2208] L⁴ and L⁶ are independently -B¹-A¹- or -A¹-B¹-;
[2209] L⁵ is a bond, -B¹-A¹- or -A¹-B¹-;
[2210] each G¹ is independently C₁₋₁₀alkyl;
[2211] each A¹ is independently a bond, —O—, —S—, or —N(R^{N1})—, wherein R^{N1} is independently hydrogen or C₁₋₆alkyl; and
[2212] each B¹ is independently a bond, C(O), C(S), S(O)₂, P(O)(OH), or P(S)(OH).

[2213] In another embodiment of Formula (XV-z) and each of the preceding embodiments thereof,
[2214] L⁴ is -B¹-A¹- or -A¹-B¹-;
[2215] L⁶ is B¹;
[2216] L⁵ is a bond, -B¹-A¹- or -A¹-B¹-;
[2217] each G¹ is independently C₁₋₁₀alkyl;
[2218] each A¹ is independently —O— or —N(H)—, and
[2219] each B¹ is independently C(O), S(O)₂, P(O)(OH), or P(S)(OH).

[2220] In another embodiment of Formula (XV-z) and each of the preceding embodiments thereof,
[2221] -L⁴-G¹-L⁵-G¹-L⁴- is -B¹-C₁₋₁₀alkyl-L⁵-C₁₋₁₀alkyl-B¹-A¹-
[2222] L⁵ is a bond, -B¹-A¹- or -A¹-B¹-;
[2223] each A¹ is independently —O— or —N(H)—, and
[2224] each B¹ is independently C(O), S(O)₂, P(O)(OH), or P(S)(OH).

[2225] In another embodiment of Formula (XV-z) and each of the preceding embodiments thereof,
[2226] -L⁴-G¹-L⁵-G¹-L⁴- is —C(O)—C₁₋₁₀alkyl-L⁵-C₁₋₁₀alkyl-C(O)N(H)—, wherein L⁵ is a bond, -B¹-A¹- or -A¹-B¹-, wherein A¹ is —O— or —N(H)—, and B¹ is C(O), S(O)₂, P(O)(OH), or P(S)(OH).

[2227] In another embodiment of Formula (XV-z) and each of the preceding embodiments thereof,
[2228] -L⁴-G¹-L⁵-G¹-L⁴- is —C(O)—C₂₋₂₀alkyl-C(O)N(H)— (e.g., —C(O)—C₆₋₁₂alkyl-C(O)N(H)—, or —C(O)—C₈₋₁₂alkyl-C(O)N(H)—, or —C(O)—C₁₀alkyl-C(O)N(H)—).

[2229] In one embodiment of Formula (XV-z) and each of the preceding embodiments thereof, Y′ is O. In another embodiment, Y′ is S.

[2230] In one embodiment of Formula (XV-z) and each of the preceding embodiments thereof, R¹ is hydrogen. In another embodiment, R¹ is C₁₋₆alkyl (e.g., methyl or t-butyl).

[2231] In one embodiment of Formula (XV-z) and each of the preceding embodiments thereof, R^{P} is hydrogen. In another embodiment, R^{P} is a nitrogen protecting group (e.g., t-butoxycarbonyl (Boc), benzyloxycarbonyl (Cbz) or phenoxyacetyl (pac)).

[2232] In one embodiment of Formula (XV-z) and each of the preceding embodiments thereof, Y′ is O and R¹ is hydrogen. In one embodiment, Y′ is O and R¹ is C₁₋₆alkyl (e.g., methyl or t-butyl). In one embodiment, Y′ is S and R¹ is hydrogen. In one embodiment, Y′ is S and R¹ is C₁₋₆alkyl (e.g., methyl or t-butyl).

[2233] In one embodiment of Formula (XV-z) and each of the preceding embodiments thereof, Y′ is O and R^{P} is hydrogen. In one embodiment, Y′ is O and R^{P} is a nitrogen protecting group (e.g., t-butoxycarbonyl (Boc), benzyloxycarbonyl (Cbz) or phenoxyacetyl (pac)). In one embodiment, Y′ is S and R^{P} is hydrogen. In one embodiment, Y′ is S and R^{P} is a nitrogen protecting group (e.g., t-butoxycarbonyl (Boc), benzyloxycarbonyl (Cbz) or phenoxyacetyl (pac)).

[2234] In one embodiment of Formula (XV-z) and each of the preceding embodiments thereof, Y′ is O, R¹ is hydrogen and R^{P} is hydrogen. In one embodiment, Y′ is S, R¹ is hydrogen and R^{P} is hydrogen.

[2235] In one embodiment, Y′ is O, R¹ is hydrogen and R^{P} is a nitrogen protecting group (e.g., t-butoxycarbonyl (Boc), benzyloxycarbonyl (Cbz) or phenoxyacetyl (pac)). In one embodiment, Y′ is S, R¹ is hydrogen and R^{P} is a nitrogen protecting group (e.g., t-butoxycarbonyl (Boc), benzyloxycarbonyl (Cbz) or phenoxyacetyl (pac)). In one embodiment, Y′ is O, R¹ is C₁₋₆alkyl (e.g., methyl or t-butyl) and R^{P} is hydrogen. In one embodiment, Y′ is S, R¹ is C₁₋₆alkyl (e.g., methyl or t-butyl) and R^{P} is hydrogen. In one embodiment, Y′ is O, R¹ is C₁₋₆alkyl (e.g., methyl or t-butyl) and R^{P} is a nitrogen protecting group (e.g., t-butoxycarbonyl (Boc), benzyloxycarbonyl (Cbz) or phenoxyacetyl (pac)). In one embodiment, Y′ is S, R¹ is C₁₋₆alkyl (e.g., methyl or t-butyl) and R^{P} is a nitrogen protecting group (e.g., t-butoxycarbonyl (Boc), benzyloxycarbonyl (Cbz) or phenoxyacetyl (pac)).

[2236] In another embodiment, the compound of Formula (XV) is selected from the group consisting of:

[chemical structure]

each R =

[chemical structure]

(2S,4R)-1-[23-((5-(4-(3-((S)-1-carboxy-3-((R)-3-(2-(5,6,7,8-tetrahydro-1,8-naphthyridin-2-
yl)ethyl)pyrrolidine-1-yl)propan-2-yl)-5-(3,5-dimethyl-1H-pyrazol-1-yl)phenyl)piperazin-1-
yl)-5-oxopentan-1-oyl)amino)-14,14-bis[3-(3-((5-(4-(3-((S)-1-carboxy-3-((R)-3-(2-(5,6,7,8-
tetrahydro-1,8-naphthyridin-2-yl)ethyl)pyrrolidine-1-yl)propan-2-yl)-5-(3,5-dimethyl-1H-
pyrazol-1-yl)phenyl)piperazin-1-yl)-5-oxopentan-1-oyl)amino)propylamino)-3-oxo-
propoxymethyl]-1,12,19-trioxo-16-oxa-13,20-diazatricos-1-yl]-4-hydroxy-2-
hydroxymethylpyrrolidine

[chemical structure]

each R =

[chemical structure]

(2S,4R)-1-[23-((5-(4-(3-((R)-1-carboxy-3-((R)-3-(2-(5,6,7,8-tetrahydro-1,8-naphthyridin-2-
yl)ethyl)pyrrolidin-1-yl)propan-2-yl)-5-(3,5-dimethyl-1H-pyrazol-1-yl)phenyl)piperazin-1-yl)-
5-oxopentan-1-oyl)amino)-14,14-bis[3-(3-((5-(4-(3-((R)-1-carboxy-3-((R)-3-(2-(5,6,7,8-
tetrahydro-1,8-naphthyridin-2-yl)ethyl)pyrrolidin-1-yl)propan-2-yl)-5-(3,5-dimethyl-1H-
pyrazol-1-yl)phenyl)piperazin-1-yl)-5-oxopentan-1-oyl)amino)propylamino)-3-oxo-
propoxymethyl]-1,12,19-trioxo-16-oxa-13,20-diazatricos-1-yl]-4-hydroxy-2-
hydroxymethylpyrrolidine

[chemical structure]

each R =

[chemical structure]

(2S,4R)-1-(6-(6-(2,6-di((5-(4-(3-((S)-1-carboxy-3-((R)-3-(2-(5,6,7,8-tetrahydro-1,8-
naphthyridin-2-yl)ethyl)pyrrolidin-1-yl)propan-2-yl)-5-(3,5-dimethyl-1H-pyrazol-1-
yl)phenyl)piperazin-1-yl)-5-oxopentan-1-oyl)amino)-(2S)-hexan-1-oylamino)hexan-1-
oylamino)hexan-1-oyl)-2-hydroxymethyl-4-hydroxypyrrolidine

[chemical structure]

each R =

[chemical structure]

(2S,4R)-1-(12-(((N-(5-(4-(3-((S)-1-carboxy-3-((R)-3-(2-(5,6,7,8-tetrahydro-1,8-naphthyridin-
2-yl)ethyl)pyrrolidin-1-yl)propan-2-yl)-5-(3,5-dimethyl-1H-pyrazol-1-yl)phenyl)piperazin-1-
yl)-5-oxopentan-1-oyl)-N^{ε}-(5-(4-(3-((S)-1-carboxy-3-((R)-3-(2-(5,6,7,8-tetrahydro-1,8-
naphthyridin-2-yl)ethyl)pyrrolidin-1-yl)propan-2-yl)-5-(3,5-dimethyl-1H-pyrazol-1-
yl)phenyl)piperazin-1-yl)-5-oxopentan-1-oyl)lysyl)-N^{ε}-(5-(4-(3-((S)-1-carboxy-3-((R)-3-(2-
(5,6,7,8-tetrahydro-1,8-naphthyridin-2-yl)ethyl)pyrrolidin-1-yl)propan-2-yl)-5-(3,5-dimethyl-
1H-pyrazol-1-yl)phenyl)piperazin-1-yl)-5-oxopentan-1-oyl)lysyl)amino)dodecan-1-oyl)-2-
hydroxymethyl-4-hydroxypyrrolidine

[chemical structure]

each R =

[chemical structure]

6-((23-((5-(4-(3-((S)-1-carboxy-3-((R)-3-(2-(5,6,7,8-tetrahydro-1,8-naphthyridin-2-
yl)ethyl)pyrrolidin-1-yl)propan-2-yl)-5-(3,5-dimethyl-1H-pyrazol-1-yl)phenyl)piperazin-1-yl)-
5-oxopentan-1-oyl)amino)-14,14-bis[3-(3-((5-(4-(3-((S)-1-carboxy-3-((R)-3-(2-(5,6,7,8-
tetrahydro-1,8-naphthyridin-2-yl)ethyl)pyrrolidin-1-yl)propan-2-yl)-5-(3,5-dimethyl-1H-
pyrazol-1-yl)phenyl)piperazin-1-yl)-5-oxopentan-1-oyl)amino)propylamino)-3-oxo-
propoxymethyl]-1,12,19-trioxo-16-oxa-13,20-diazatricos-1-yl)amino)-1-azidohexane

[chemical structure]

2′-O-(6-(6-(6-(N,N^{ε}-bis(5-(4-(3-((S)-1-carboxy-3-((R)-3-(2-(5,6,7,8-tetrahydro-1,8-
naphthyridin-2-yl)ethyl)pyrrolidin-1-yl)propan-2-yl)-5-(3,5-dimethyl-1H-pyrazol-1-
yl)phenyl)piperazin-1-yl)-5-oxopentan-1-oyl)-L-lysyl)aminohexan-1-oylamino)hexan-1-
oylamino)hex-1-yl)-cytidine 3′-phosphate;
and salts thereof.

### Synthetic Intermediates

[2237] In another aspect, compounds are provided that are suitable for preparing the various ligands described herein. In one embodiment, the compound is of the Formula (VI), (VI-a) through (VI-e), and (VII),

[chemical structure]

[2238] or a salt thereof, wherein
[2239] R¹ is hydrogen or C₁₋₆alkyl (e.g., methyl or tert-butyl);
[2240] R¹ and R⁵¹ are independently hydrogen or a nitrogen-protecting group;
[2241] and
[2242] each R group is independently selected from the group consisting of R′, C₁₋₆alkyl, C₁₋₆haloalkyl, C₂₋₆alkenyl, C₂₋₆alkynyl, C₃₋₈cycloalkyl, heterocyclyl, aryl, heteroaryl, C₃₋₈cycloalkylC₁₋₆alkyl, heterocyclylC₁₋₆alkyl, aryl C₁₋₆alkyl, heteroarylC₁₋₆alkyl, each of which, other than R′, is optionally substituted with 1, 2, or 3 R′ groups, wherein
   [2243] each R′ is independently halogen, cyano, azido, nitro, —N(R^{b})₂, —O(R^{a}), —S(R⁰), —C(O)OR⁰, —C(O)R⁰, —C(O)N(R⁰)₂, —C(NR⁰)OR⁰, —C(NR⁰)R⁰, —C(NR⁰)N(R⁰)₂, —C(S)OR⁰, —C(S)R⁰, —C(S)N(R⁰)₂, —S(O)₂R⁰, —S(O)₂OR⁰, —S(O)₂N(R⁰)₂, —N(R⁰)C(O)OR, —N(R⁰)C(O)R⁰, —N (R⁰)C(O)N(R⁰)₂, —N(R⁰)S(O)₂R⁰, —N(R⁰)S(O)₂OR⁰, —N(R⁰)S(O)₂N(R⁰)₂, —OC(O)OR, —OC(O)R⁰, —OC(O)N(R⁰)₂, —OS(O)₂R⁰, —OS(O)₂OR⁰, —OS(O)₂N(R⁰)₂, or —SC(O)R⁰, wherein
      [2244] each R⁰ is independently hydrogen or C₁₋₆alkyl; each R^{a} is independently hydrogen, C₁₋₆alkyl, or a hydroxyl protecting group; and each R^{b} is independently hydrogen, C₁₋₆alkyl, or a nitrogen protecting group.

[2245] In one embodiment of Formulae (VI), (VI-a) through (VI-e), and (VII),
[2246] (a) R¹ is hydrogen;
[2247] (b) R¹ is C₁₋₆alkyl (e.g., methyl or t-butyl);
[2248] (c) R¹ is hydrogen;
[2249] (d) R¹ is a nitrogen protecting group;
[2250] (e) R⁵¹ is hydrogen; or
[2251] (f) R⁵¹ is a nitrogen protecting group.

[2252] In one embodiment of Formulae (VI), (VI-a) through (VI-d), and (VII),
[2253] (a) R¹ is hydrogen and R¹ is a nitrogen protecting group;
[2254] (b) R¹ is hydrogen and R¹ is hydrogen;
[2255] (c) R¹ is C₁₋₆alkyl (e.g., methyl or t-butyl), and R¹ is a nitrogen protecting group;
[2256] (d) R¹ is C₁₋₆alkyl (e.g., methyl or t-butyl), and R¹ is hydrogen;
[2257] (e) R¹ is hydrogen and R⁵¹ is hydrogen;
[2258] (f) R¹ is hydrogen and R⁵¹ is a nitrogen protecting group;
[2259] (g) R¹ is C₁₋₆alkyl (e.g., methyl or t-butyl), and R¹ is hydrogen;
[2260] (h) R¹ is C₁₋₆alkyl (e.g., methyl or t-butyl), and R¹ is a nitrogen protecting group;
[2261] (i) R¹ is a nitrogen protecting group. and R⁵¹ is hydrogen;
[2262] (j) R¹ is a nitrogen protecting group. and R⁵¹ is a nitrogen protecting group;
[2263] (k) R¹ is hydrogen, and R⁵¹ is hydrogen; or
[2264] (l) R¹ is hydrogen, and R⁵¹ is a nitrogen protecting group.

[2265] In another embodiment of Formulae (VI), (VI-a) through (VI-d), and (VII),
[2266] (a) R¹ is hydrogen, R⁵¹ is hydrogen, and R¹ is hydrogen;
[2267] (b) R¹ is hydrogen, R⁵¹ is hydrogen, and R¹ is a nitrogen protecting group;
[2268] (c) R¹ is hydrogen, R⁵¹ is a nitrogen protecting group, and R¹ is hydrogen;
[2269] (d) R¹ is hydrogen, R⁵¹ is a nitrogen protecting group, and R¹ is a nitrogen protecting group;
[2270] (e) R¹ is C₁₋₆alkyl (e.g., methyl ort-butyl), R¹ is hydrogen, and R¹ is hydrogen;
[2271] (f) R¹ is C₁₋₆alkyl (e.g., methyl ort-butyl), R¹ is hydrogen, and R¹ is a nitrogen protecting group;
[2272] (g) R¹ is C₁₋₆alkyl (e.g., methyl or t-butyl), R⁵¹ is a nitrogen protecting group, and R^{P1} is hydrogen; or
[2273] (h) R¹ is C₁₋₆alkyl (e.g., methyl ort- butyl), R⁵¹ is a nitrogen protecting group, and R^{P1} is a nitrogen protecting group.

[2274] In one embodiment, the compound of Formula (VI) is selected from the group consisting of:

| | |
|---|---|
| [chemical structure] | tert-butyl (R)-4-(3-(1-(3-(2-(1,8-naphthyridin-2- yl)ethyl)pyrrolidin-1-yl)-4-methoxy-4-oxobutan-2-yl)-5-(3,5- dimethyl-1H-pyrazol-1-yl)phenyl)piperazine-1-carboxylate |
| [chemical structure] | Tert-butyl 4-(3-((S)-1-((R)-3-(2-(1,8-naphthyridin-2- yl)ethyl)pyrrolidin-1-yl)-4-methoxy-4-oxobutan-2-yl)-5-(3,5- dimethyl-1H-pyrazol-1-yl)phenyl)piperazine-1-carboxylate |
| [chemical structure] | tert-butyl 4-(3-((R)-1-((R)-3-(2-(1,8-naphthyridin-2- yl)ethyl)pyrrolidin-1-yl)-4-methoxy-4-oxobutan-2-yl)-5-(3,5- dimethyl-1H-pyrazol-1-yl)phenyl)piperazine-1-carboxylate |
| [chemical structure] | benzyl 4-(3-(3,5-dimethyl-1H-pyrazol-1-yl)-5-(4-methoxy-1- ((R)-3-(2-(4-methoxy-1,8-naphthyridin-2-yl)ethyl)pyrrolidin-1- yl)-4-oxobutan-2-yl)phenyl)piperazine-1-carboxylate |
| [chemical structure] | tert-butyl 4-(3-(3,5-dimethyl-1H-pyrazol-1-yl)-5-((S)-4- methoxy-4-oxo-1-((R)-3-(2-(5,6,7,8-tetrahydro-1,8- naphthyridin-2-yl)ethyl)pyrrolidin-1-yl)butan-2- yl)phenyl)piperazine-1-carboxylate |
| [chemical structure] | tert-butyl 4-(3-(3,5-dimethyl-1H-pyrazol-1-yl)-5-((R)-4- methoxy-4-oxo-1-((R)-3-(2-(5,6,7,8-tetrahydro-1,8- naphthyridin-2-yl)ethyl)pyrrolidin-1-yl)butan-2- yl)phenyl)piperazine-1-carboxylate |
| [chemical structure] | methyl (R)-3-(3-(3,5-dimethyl-1H-pyrazol-1-yl)-5-(piperazin- 1-yl)phenyl)-4-((R)-3-(2-(5,6,7,8-tetrahydro-1,8-naphthyridin- 2-yl)ethyl)pyrrolidin-1-yl)butanoate |
| [chemical structure] | methyl (S)-3-(3-(3,5-dimethyl-1H-pyrazol-1-yl)-5-(piperazin- 1-yl)phenyl)-4-((R)-3-(2-(5,6,7,8-tetrahydro-1,8-naphthyridin- 2-yl)ethyl)pyrrolidin-1-yl)butanoate |
| [chemical structure] | tert-butyl 7-(((3R)-1-(2-(3-(4-((benzyloxy)carbonyl)piperazin- 1-yl)-5-(3,5-dimethyl-1H-pyrazol-1-yl)phenyl)-4-methoxy-4- oxobutyl)pyrrolidin-3-yl)methoxy)-3,4-dihydro-1,8- naphthyridine-1(2H)-carboxylate |
| [chemical structure] | tert-butyl 7-(((R)-1-((S)-2-(3-(3,5-dimethyl-1H-pyrazol-1-yl)- 5-(piperazin-1-yl)phenyl)-4-methoxy-4-oxobutyl)pyrrolidin-3- yl)methoxy)-3,4-dihydro-1,8-naphthyridine-1(2H)-carboxylate |
| [chemical structure] | methyl (S)-3-(3-(3,5-dimethyl-1H-pyrazol-1-yl)-5-(piperazin- 1-yl)phenyl)-4-((R)-3-(2-(4-methoxy-5,6,7,8-tetrahydro-1,8- naphthyridin-2-yl)ethyl)pyrrolidin-1-yl)butanoate |
| [chemical structure] | tert-butyl 4-(3-((S)-1-((R)-3-(2-(6-amino-5-methoxypyridin-2- yl)ethyl)pyrrolidin-1-yl)-4-methoxy-4-oxobutan-2-yl)-5-(3,5- dimethyl-1H-pyrazol-1-yl)phenyl)piperazine-1-carboxylate |
| [chemical structure] | methyl (S)-4-((R)-3-(2-(6-amino-5-methoxypyridin-2- yl)ethyl)pyrrolidin-1-yl)-3-(3-(3,5-dimethyl-1H-pyrazol-1-yl)- 5-(piperazin-1-yl)phenyl)butanoate |

### Process for Preparing an Oligonucleotide Conjugate

[2275] In some embodiments, the present disclosure also provides a process for preparing an oligonucleotide conjugate, comprising contacting an oligonucleotide comprising at least one functional group that is a first member of a reactive pair with a compound of the Formula (IV) or Formula (V) as defined above, wherein the compound comprises a Z or Z⁰ group, according to any of the preceding embodiments, where the Z or Z⁰ group is the second member of the reactive pair, under conditions suitable for forming a covalent linkage between the first member and the second member of the reactive pair.

[2276] In some embodiments, the first member of a reactive pair is an azide or

[chemical structure]

and Z comprises a terminal alkyne

[chemical structure]

[2277] In some embodiments, the first member of a reactive pair is an azide or

[chemical structure]

and Z comprises a cyclooctyne, dibenzocyclooctyne, dibenzoazacyclooctyne or trans-cyclooctene, such as,

[chemical structure]

[2278] In some embodiments, Z is an azide or

[chemical structure]

and the first member of a reactive pair comprises:

[chemical structure]

[2279] In some embodiments, Z is

[chemical structure]

and the first member of a reactive pair comprises

[chemical structure]

[2280] In some embodiments, Z is —SH and first member of a reactive pair is

[chemical structure]

[2281] In some embodiments, Z is

[chemical structure]

and first member of a reactive pair is —SH.

[2282] In some embodiments, Z is

[chemical structure]

and first member of a reactive pair is —SH.

[2283] In some embodiments, Z is —SH and first member of a reactive pair is

[chemical structure]

[2284] In some embodiments, Z comprises —CH═CH₂ and first member of a reactive pair comprises —CH═CH₂, and the contacting is in the presence of an olefin metathesis catalyst (e.g., Grubbs' catalyst, Benzylidene-bis(tricyclohexylphosphino)-dichlororuthenium).

[2285] In some embodiments, Z is —N═C═O or —N═C═S and first member of a reactive pair is H₂N—HN(R)—, HO—, HS—.

[2286] In some embodiments, wherein R¹ is C₁₋₆alkyl, the process further comprises contacting the oligonucleotide conjugate with a reagent capable of converting the —COOR¹ group to a —COOH group, or a salt thereof. In some embodiments, the reagent comprises a base; e.g., the base is a secondary amine, such as piperidine.

[2287] In some embodiments, wherein R¹ is C₁₋₆alkyl, the first member of a reactive pair is an azide, a terminal alkyne, a cycloalkyne, a trans-cycloalkene, or a tetrazine group.

[2288] In some embodiments, wherein R¹ is C₁₋₆alkyl, the first member of a reactive pair is an azide, and the second member of the reactive pair is a terminal alkyne, cycloalkyne, trans-cycloalkene, or tetrazine group.

[2289] In some embodiments, wherein R¹ is C₁₋₆alkyl, the first member of a reactive pair is a terminal alkyne, cycloalkyne, trans-cycloalkene, or tetrazine group, and the second member of the reactive pair is an azide.

[2290] In some embodiments, the oligonucleotide is of the Formula (XX):

[chemical structure]

wherein
[2291] Z′ is a member of a reactive pair;
[2292] G⁰, L′, and L^{L} are each as defined for Formula (X); wherein L^{L} connects to a a terminal or internal position on the oligonucleotide.

[2293] In some embodiments, the oligonucleotide is of the Formula (XX-3′), (XX-5′), or (XX-2′):

[chemical structure]

wherein Y is O or S (e.g., O); Z′ is a member of a reactive pair; L^{L} is —P(O)(OH)— or —P(S)(OH)—; G⁰ and L′ are as defined in any Formula or embodiment above, or a salt thereof.

[2294] In Formula (XX-2′), in one embodiment, the internal nucleoside of Formula (XX-2′) can be represented by one of,

[chemical structure]

[chemical structure]

wherein
[2295] B is an optionally modified nucleobase (e.g., adenine, cytosine, uracil, guanine, 5-methylcytosine, or -5-methyluracil);
[2296] each n is independently 0 or an integer selected from 1-10; (e.g., 1-5, or 1-3, or 3, or 2, or 1);
[2297] each m n is independently integer selected from 1-20 (e.g., 2-12, or 2-10; or 2-6; or 2; or 3; or 4; or 5; or 6).

[2298] In Formula (XX-2′), in one embodiment, the internal nucleoside of Formula (XX-2′) can be represented by one of,

[chemical structure]

[chemical structure]

[2299] In some embodiments of Formula (XX-2′), two adjacent nucleosides in the oligonucleotide have one of the formula

[chemical structure]

wherein Y is O or S (or O; or S); [symbol] represents the remainder for the oligonucleotide, and B is an optionally modified nucleobase.

[2300] In some embodiments of Formula (XX-2′), three adjacent nucleosides in the oligonucleotide have the formula

[chemical structure]

wherein each Y is independently O or S (or O; or S; or O then S or S then O, 5′ followed by 3′); [symbol] represents the remainder for the oligonucleotide, and B is an optionally modified nucleobase; e.g., each Y is O.
In some embodiments of Formula (XX-2′), four adjacent nucleosides in the oligonucleotide have the formula,

[chemical structure]

wherein each Y is independently O or S; [symbol] represents the remainder for the oligonucleotide, and B is an optionally modified nucleobase; e.g., each Y is O.

[2301] Examples of (XX-p1) and (XX-p2) include,

[chemical structure]

[2302] In Formula (XX-5′), in one embodiment, the terminal nucleoside can be represented by,

[chemical structure]

wherein B is an optionally modified nucleobase; wherein Y is O or S (e.g., S); and R² is hydrogen, halogen (e.g., fluoro), hydroxy, C₁₋₆alkoxy, C₁₋₆alkoxyC₁₋₆alkoxy (e.g., 2-methoxyethoxy), 2-(N-methylamino)-2-oxoethoxy.

[2303] In one embodiment of Formula (XX-5′-a), R^{2′} is methoxy. In another embodiment, B is uracil or 5-methyluracil. In another embodiment, B is uracil or 5-methyluracil and R^{2′} is methoxy. In another embodiment, B is adenine. In another embodiment, B is adenine and R^{2′} is methoxy. In another embodiment, B is cytosine or 5-methylcytosine. In another embodiment, B is cytosine or 5-methylcytosine and R^{2′} is methoxy. In another embodiment, B is guanine. In another embodiment, B is guanine and R^{2′} is methoxy.

[2304] In another embodiment of Formula (XX-5′-a), R^{2′} is fluoro. In another embodiment, B is uracil or 5-methyluracil. In another embodiment, B is uracil or 5-methyluracil and R^{2′} is fluoro. In another embodiment, B is adenine. In another embodiment, B is adenine and R^{2′} is fluoro. In another embodiment, B is cytosine or 5-methylcytosine. In another embodiment, B is cytosine or 5-methylcytosine and R^{2′} is fluoro. In another embodiment, B is guanine. In another embodiment, B is guanine and R^{2′} is fluoro.

[2305] In Formula (XX-3′), in one embodiment, the terminal nucleoside can be represented by,

[chemical structure]

wherein B is an optionally modified nucleobase; wherein Y is O or S (e.g., S); and R^{2′} is hydrogen, halogen (e.g., fluoro), hydroxy, C₁₋₆alkoxy, C₁._alkoxyC₁₋₆alkoxy (e.g., 2-methoxyethoxy), 2-(N-methylamino)-2-oxoethoxy.

[2306] In one embodiment of Formula (XX-3′-a), R^{2′} is methoxy. In another embodiment, B is uracil or 5-methyluracil. In another embodiment, B is uracil or 5-methyluracil and R^{2′} is methoxy. In another embodiment, B is adenine. In another embodiment, B is adenine and R^{2′} is methoxy. In another embodiment, B is cytosine or 5-methylcytosine. In another embodiment, B is cytosine or 5-methylcytosine and R^{2′} is methoxy. In another embodiment, B is guanine. In another embodiment, B is guanine and R^{2′} is methoxy.

[2307] In another embodiment of Formula (XX-3′-a), R^{2′} is fluoro. In another embodiment, B is uracil or 5-methyluracil. In another embodiment, B is uracil or 5-methyluracil and R^{2′} is fluoro. In another embodiment, B is adenine. In another embodiment, B is adenine and R^{2′} is fluoro. In another embodiment, B is cytosine or 5-methylcytosine. In another embodiment, B is cytosine or 5-methylcytosine and R^{2′} is fluoro. In another embodiment, B is guanine. In another embodiment, B is guanine and R^{2′} is fluoro.

[2308] In some embodiments of Formula (XX-3′), (XX-5′), and (XX-2′) and any preceding embodiment thereof, -L′- is -L′-[G-L²]-G-L³-*, wherein * is the bond to Z′.

[2309] In some embodiments, -L′- is -L′-G-L³-*, wherein * is the bond to Z′.

[2310] In some embodiments, -L′- is —C₂₋₃₀alkyl-*, wherein * is the bond to Z′.

[2311] In some embodiments, -L′- is -L¹-[G-L²]_{q}-G-L³-*, wherein * is the bond to Z′;
[2312] q is 0, 1, 2, 3, 4, or 5;
[2313] L¹ is a bond or -B-A-;
[2314] each L² is independently -A-B-A-;
[2315] L³ is a bond or -A-B-A-;
[2316] each A is independently a bond, —O—, —S—, or —N(R^{N})—;
[2317] each B is independently a bond, CH₂, C(O), C(S), C(NR^{N}), S(O), S(O)₂, P(O)(OH), P(S)(OH), or P(S)(SH);
[2318] each R^{N} is independently hydrogen or C₁₋₆alkyl; and
[2319] each G is independently C₁₋₁₀alkyl, C₂₋₁₀alkenyl, C₂₋₁₀alkynyl, each of which is optionally substituted with 1, 2, 3, or 4 R groups.

[2320] In some embodiments, -L′- is -L¹-[G-L²]_{q}-G-*, wherein * is the bond to Z′
[2321] q is 0, 1, 2, or 3;
[2322] L¹ is a bond or -B-A-;
[2323] L¹ is a bond or -B-A-;
[2324] each L² is independently a bond, C(O)O, OC(O), C(O)(NR^{N}), N(R^{N})C(O), SO₂N(R^{N}), N(R^{N})SO₂, OP(O)(OH), OP(S)(OH), P(O)(OH)O, P(S)(OH)O, OP(O)(OH)O, or OP(S)(OH)O, wherein each R^{N} is independently hydrogen or C₁₋₆alkyl; and
[2325] each G is independently C₁₋₁₀alkyl, C₂₋₁₀alkenyl, C₂₋₁₀alkynyl, each of which is optionally substituted with 1 or 2 R groups.

[2326] In some embodiments, -L′- is -L¹-[G-L²]_{q}-G-*, wherein * is the bond to Z′;
[2327] q is 0, 1, 2, or 3;
[2328] L¹ is a bond or -B-A-;
[2329] each L² is independently a bond, C(O)O, OC(O), C(O)(NR^{N}), N(R^{N})C(O), OP(O)(OH)O, or OP(S)(OH)O, wherein each R^{N} is independently hydrogen or C₁₋₆ alkyl; and
[2330] each G is independently C₁₋₁₀alkyl or C₂₋₁₀alkenyl, each of which is optionally substituted with 1 or 2 R groups.

[2331] In some embodiments, -L′- is -[G-L²]_{q}-G-*, wherein * is the bond to Z′;
[2332] q is 0, 1, 2, or 3 (e.g., q is 0, 1, or 2; or 0 or 1; or 0; or 1; or 2);
[2333] each L² is independently C(O)O or OC(O); and
[2334] each G is independently C₁₋₁₀alkyl, each of which is optionally substituted with 1 or 2 R groups.

[2335] In some embodiments, -L′- is -[G-L²]_{q}-G-*, wherein * is the bond to Z′;
[2336] q is 0, 1, 2, or 3 (e.g., q is 0, 1, or 2; or 0 or 1; or 0; or 1; or 2);
[2337] each L² is independently C(O)(NR^{N}) or N(R^{N})C(O), wherein each R^{N} is independently hydrogen or C₁₋₆alkyl; and
[2338] each G is independently C₁₋₁₀alkyl, each of which is optionally substituted with 1 or 2 R groups.

[2339] In some embodiments, -L′- is -[G-L²]_{q}-G-*, wherein * is the bond to Z′;
[2340] q is 0, 1, 2, or 3 (e.g., q is 0, 1, or 2; or 0 or 1; or 0; or 1; or 2);
[2341] each L² is independently OP(O)(OH)O, or OP(S)(OH)O (e.g., each is OP(O)(OH)O); and
[2342] each G is independently C₁₋₁₀alkyl, each of which is optionally substituted with 1 or 2 R groups.

[2343] In some embodiments, -L′- is -[G-L²]_{q}-G-*, wherein * is the bond to Z′;
[2344] q is 0, 1, 2, or 3 (e.g., q is 0, 1, or 2; or 0 or 1; or 0; or 1; or 2);
[2345] each L² is a bond; and
[2346] each G is independently C₁₋₁₀alkyl, each of which is optionally substituted with 1 or 2 R groups.

[2347] In some embodiments, -L′-Z′ is selected from the group consisting of:

[chemical structure]

[chemical structure]

[2348] In some embodiments of Formula (XX-5′),

[chemical structure]

wherein O-G⁰-L′-Z′ is

[chemical structure]

wherein v is an integer between 1 and 20 (e.g., an integer between 1 and 16, an integer between 1 and 12, an integer between 1 and 10, and integer between 3 and 9, 3, 4, 5, 6, 7, 8 or 9).

[2349] In other embodiments of Formula (XX-5′), —O-G⁰-L′-Z′ is selected from the group consisting of:

[chemical structure]

[chemical structure]

[2350] In some embodiments of Formula (XX-3′),

[chemical structure]

### O-G⁰ L′-Z′ is

[chemical structure]

or OH wherein v is an integer between 1 and 20, (e.g., an integer between 1 and 16, an integer between 1 and 12, an integer between 1 and 10, and integer between 3 and 9, 3, 4, 5, 6, 7, 8 or 9).

[2351] In other embodiments of Formula (XX-3′), —O-G⁰-L′-Z′ is selected from the group consisting of:

[chemical structure]

[chemical structure]

[chemical structure]

[chemical structure]

[2352] The process described above, using a compound of Formula (IV), where Z is a member of a reactive pair, with an oligonucleotide of Formula (XX), (XX-2′), (XX-3′) or (XX-5′) results in generating an oligonucleotide of the formula,

[chemical structure]

wherein ZZ is formed by reaction of the reactive pair represented by Z and Z′, respectively.
[2353] -L-Φ is according Formula (XII) and any embodiment thereof;
[2354] ZZ is a covalent construct formed by the reactive pair (i.e., Z and Z′);
[2355] L′, G⁰, and L^{L} are as defined in Formula (X), including any embodiment thereof. In certain embodiments, LL is —P(O)(OH)—. In other embodiments, L^{L} is —P(S)(OH)—.

[2356] The process described above, using a compound of Formula (V), where Z⁰ is a member of a reactive pair, with an oligonucleotide of Formula (XX), (XX-2′), (XX-3′) or (XX-5′) results in generating an oligonucleotide of the formula,

[chemical structure]

wherein ZZ is formed by reaction of the reactive pair represented by Z⁰ and Z′, respectively.
[2357] -L-Φ is according Formula (XII) and any embodiment thereof;
[2358] ZZ is a covalent construct formed by the reactive pair (i.e., Z⁰ and Z′);
[2359] L′, G⁰, and L^{L} are as defined in Formula (XV), including any embodiment thereof. In certain embodiments, LL is —P(O)(OH)—. In other embodiments, L^{L} is —P(S)(OH)—.

[2360] In certain embodiments, the process described can utilize an oligonucleotide of the formula,

[chemical structure]

with a compound of Formula (IV), where Z is a member of a reactive pair, results, respectively, in generating an oligonucleotide of the formula,

[chemical structure]

wherein
[2361] -L-Φ is according Formula (XII) and any embodiment thereof;
[2362] ZZ is a covalent construct formed by the reactive pair (i.e., Z and Z′); and
[2363] T, G⁰, and L^{L} are as defined in Formula (X), including any embodiment thereof. In certain embodiments, LL is —P(O)(OH)—. In other embodiments, L^{L} is —P(S)(OH)—.

[2364] In certain embodiments, the process described can utilize an oligonucleotide of the Formula (XX-x1), (XX-x2), (XX-3′-x), or (XX-5′-x), with a compound of Formula (V), where Z⁰ is a member of a reactive pair, results, respectively, in generating an oligonucleotide of the formula,

[chemical structure]

respectively, wherein
[2365] -L-Φ is according Formula (XII) and any embodiment thereof;
[2366] ZZ is a covalent construct formed by the reactive pair (i.e., Z and Z′ or Z⁰ and Z′); and
[2367] T, G⁰, and LL are as defined in Formula (XV), including any embodiment thereof. In certain embodiments, LL is —P(O)(OH)—. In other embodiments, L^{L} is —P(S)(OH)—.

[2368] For example, in oligonucleotides of any of the preceding formulae containing Δ, can be provided where Δ is of the formula,

[chemical structure]

[2369] wherein
[2370] # is the bond to T;
[2371] y is 1, 2, 3, 4, or 5;
[2372] q2 is 1, 2, 3, 4, 5, 6, 7, or 8;
[2373] q3 is 0, 1, 2, 3, 4, 5, 6, 7, or 8;
[2374] each G², G³, and G⁴ is independently -D²-E²-F²-, wherein
   [2375] D², E², and F² are independently a bond, C₁₋₁₀alkyl, C₂₋₁₀alkenyl, C₂₋₁₀alkynyl, C₃₋₁₀cycloalkyl, 3-10 membered heterocyclyl, aryl, or heteroaryl, each of which is optionally substituted with 1, 2, 3, 4, or 5 R groups, and
   [2376] wherein each G² and G⁴ optionally contains at least one bond to a Z′ (e.g., one bond to a Z′);
[2377] or G³ is N and y is 2;
[2378] each L⁷ is independently -A²-B²-A²-; wherein
   [2379] each A² is independently a bond, —O—, —S—, or —N(R^{N2})—;
   [2380] each B² is independently a bond, C(O), C(S), C(NR^{N2}), S(O), S(O)₂, P(O)(OH), P(S)(OH), or P(S)(SH); and
   [2381] each R^{N2} is independently hydrogen, C₁₋₆alkyl, a bond to a Z′, or two R^{N2} within an -A²-B²-A²- group taken together with the atoms to which they are connected from a 4-8 membered heterocyclyl;
[2382] and
[2383] each R^{B} is independently halogen, cyano, azido, nitro, —N(R¹⁰)₂, —O(R¹⁰), —S(R¹⁰), —C(O)OR¹⁰, —C(O)R¹⁰, —C(O)N(R¹⁰)₂, —C(NR¹⁰)OR¹⁰, —C(NR¹⁰)R¹⁰, —C(NR¹⁰)N(R¹⁰)₂, —C(S)OR¹⁰, —C(S)R¹⁰, —C(S)N(R¹⁰)₂, —S(O)₂R¹⁰, —S(O)₂OR¹⁰, —S(O)₂N(R¹⁰)₂, —N(R¹⁰)C(O)OR¹⁰, —N(R¹⁰)C(O) R¹⁰, —N(R¹⁰)C(O)N(R¹⁰)₂, —N(R¹⁰)S(O)₂R¹⁰, —N(R¹⁰)S(O)₂OR¹⁰, —N(R¹⁰)S(O)₂N(R¹⁰)₂, —OC(O)OR¹⁰, —OC(O)R¹⁰, —OC(O)N(R¹⁰)₂, —OS(O)₂R¹⁰, —OS(O)₂OR¹⁰, —OS(O)₂N(R¹⁰)₂, or —SC(O)R¹⁰, wherein each R¹⁰ is independently hydrogen, C₁₋₁₀alkyl, C₂₋₁₀alkenyl, C₂₋₁₀alkynyl, C₃₋₁₀cycloalkyl, 3-10 membered heterocyclyl, aryl, or heteroaryl. provided that Δ contains x bonds to Z′.

[2384] In one embodiment, -Δ- is #-[G²-L⁷]_{q2}-*, where # is the bond to T and * is a bond to a Z′ group. For example, such embodiments include the following,

[chemical structure]

wherein each * is a bond to a Z′; # is the bond to T,
[2385] each G² is independently C₁₋₁₀alkyl, C₂₋₁₀alkenyl, C₃₋₁₀cycloalkyl, 3-10 membered heterocyclyl, aryl, or heteroaryl, each of which is optionally substituted with 1, 2, 3, 4, or 5 R^{B} groups; and each L⁷ is independently -A²-B²-A²-, wherein each A² is independently a bond, —O—, —S—, or —N(R^{N2})—; each B² is independently a bond, C(O), S(O)₂, P(O)(OH), or P(S)(OH).

[2386] In one embodiment, each G² is independently C₁₋₁₀alkyl, each optionally substituted with 1 or 2 R^{B} groups. In one embodiment, each G² is independently C₁₋₁₀alkyl.

[2387] In one embodiment, each L⁷ is independently -A²-B²-A²-, wherein each A² is independently a bond, —O—, —S—, or —N(R^{N2})—; and each B² is independently a bond, C(O) or S(O)₂, provided that at least one A² is not a bond.

[2388] In one embodiment, each L⁷ is independently -A²-B²— or -B²-A²-, wherein each A² is independently, —O—, —S—, or —N(R^{N2})—; and each B² is independently a bond, C(O) or S(O)₂.

[2389] For example, such embodiments include each of the following,

[chemical structure]

wherein # is the bond to T and each * is a bond to a Z′ group; and each G² is independently C₁₋₁₀alkyl.

[2390] For example, such embodiments include each of the following, wherein # is the bond to T and each * is a bond to a Z′;

[chemical structure]

wherein # is the bond to T and each * is a bond to a Z′ group.

[2391] For example, such embodiments include each of the following,

[chemical structure]

wherein # is the bond to T, each * is a bond to a Z′ group, and
[2392] each L⁷ is selected from the group consisting of —O—, —S—, —N(H)—, —C(O)O—, —OC(O)—, —C(O)N(H)—, —OC(O)O—, —N(H)C(O)O—, —OC(O)N(H)—, —OP(O)(OH)O—, or —OP(S)(OH)O—; and each G⁴ is independently -D²-E²-F²-, wherein
   [2393] each D² and F² are independently a bond or C₁₋₁₀alkyl, C₂₋₁₀alkenyl, C₂₋₁₀alkynyl, C₃₋₁₀cycloalkyl, 3-10 membered heterocyclyl, aryl, or heteroaryl, each of which is optionally substituted with 1, 2, 3, 4, or 5 R groups, and
   [2394] each E² is independently bond, C₁₋₁₀alkyl, C₂₋₁₀alkenyl, C₃₋₁₀cycloalkyl, 3-10 membered heterocyclyl, aryl, or heteroaryl, each of which is optionally substituted with 1, 2, 3, 4, or 5 R^{B} groups, provided that E² is not a bond with D² and F² are each bonds.

[2395] For example, such embodiments include each of the following, wherein each * is a bond to a Z′;

[chemical structure]

wherein # is the bond to T and each * is a bond to a Z′ group.

[2396] Exemplary reactive pairs that may be used in the context of the present disclosure are shown below, wherein, in each instance:
[2397] each R is independently C₁₋₁₀alkyl (e.g., methyl, ethyl, propyl, isopropyl, t-butyl, isobutyl, butyl, or hexyl);
[2398] R^{E} is forms an activated ester, as defined by any embodiment herein, or is R;
[2399] X is a leaving group (e.g., bromo, iodo, tosylate, mesylate, or triflate);
[2400] R^{La} is hydrogen, C₁₋₁₀alkyl (e.g., methyl, ethyl, propyl, isopropyl, t-butyl, isobutyl, butyl, or hexyl), C₃₋₈cycloalkyl, 3-8 membered heterocyclyl, aryl (e.g., phenyl), or heteroaryl (e.g., 2-pyridyl).

| Reactive Pairs (Z) and (Z′) throughout | | Covalent linkage formed by the reactive pair | |
|---|---|---|---|
| First member | Second member | (ZZ) | |
| —N₃ | [chemical structure] | [chemical structure] | |
| | | or | |
| | | [chemical structure] | |
| —N₃ | [chemical structure] | [chemical structure] | |
| | | or | |
| | | [chemical structure] | |
| —N₃ | [chemical structure] | [chemical structure] | |
| —N₃ | [chemical structure] | [chemical structure] | |
| —N₃ | [chemical structure] | [chemical structure] | |
| | | or | |
| | | [chemical structure] | |
| —N₃ | [chemical structure] | [chemical structure] | |
| | | or | |
| | | [chemical structure] | n |

| | | |
|---|---|---|
| | | is 0-20, e.g., n is 1-11 |
| [chemical structure] | [chemical structure] | [chemical structure] |
| | | or |
| | | [chemical structure] |
| [chemical structure] | [chemical structure] | [chemical structure] |
| | | or |
| | | [chemical structure] |
| [chemical structure] | [chemical structure] | [chemical structure] |
| [chemical structure] | [chemical structure] | [chemical structure] |
| [chemical structure] | [chemical structure] | [chemical structure] |
| | | or |
| | | [chemical structure] |
| [chemical structure] | [chemical structure] | [chemical structure] |
| —SH | [chemical structure] | [chemical structure] |
| —C(H)═O | H₂N— | —C(H)═N— |
| —C(H)═O | H₂N—N(H)— | —C(H)═N—N(H)— |
| —C(H)═O | H₂N—N(H)C(O)— | —C(H)═N—N(H)C(O)— |
| —C(H)═O | H₂N—N(R)— | —C(H)═N—N(R)— |
| —C(H)═O | H₂N—N(R)C(O)— | —C(H)═N—N(R)C(O)— |
| —C(H)═O | H₂NO— | —C(H)═N—O— |
| —C(O)OH | H₂N— | —C(O)N(H)— |
| —C(O)OH | H₂N—N(H)— | —C(O)N(H)—N(H)— |
| —C(O)OH | H₂N—N(R)— | —C(O)N(H)—N(R)— |
| —C(O)OH | HN(R)— | —C(O)N(R)— |
| —C(O)OH | HO— | —C(O)O— |
| —C(O)OH | HS— | —C(O)S— |
| —C(O)OR^{E} | H₂N— | —C(O)N(H)— |
| —C(O)OR^{E} | H₂N—N(H)— | —C(O)N(H)—N(H)— |
| —C(O)OR^{E} | H₂N—N(R)— | —C(O)N(H)—N(R)— |
| —C(O)OR^{E} | HN(R)— | —C(O)N(R)— |
| —C(S)OH | H₂N— | —C(S)N(H)— |
| —C(S)OH | HN(R)— | —C(S)N(R)— |
| —C(S)OH | HO— | —C(S)O— |
| —C(S)OH | HS— | —C(S)S— |
| —C(S)OR^{E} | H₂N— | —C(S)N(H)— |
| —C(S)OR^{E} | HN(R)— | —C(S)N(R)— |
| —N═C═O | H₂N— | —N(H)C(O)N(H)— |
| —N═C—O | HN(R)— | —N(H)C(O)N(R)— |
| —N═C═O | HO— | —N(H)C(O)O— |
| —N═C═O | HS— | —N(H)C(O)S— |
| —N═C═S | H₂N— | —N(H)C(S)N(H)— |
| —N═C═S | HN(R)— | —N(H)C(S)N(R)— |
| —N═C═S | HO— | —N(H)C(S)O— |
| —N═C═S | HS— | —N(H)C(S)S— |
| —SH | HS— | —S—S— |
| [chemical structure] | HS— | —S—S— |
| [chemical structure] | HS— | —S—S— |
| —CH₂—X | HS— | —CH₂—S— |
| —CH₂—X | HO— | —CH₂—O— |
| —CH₂—X | H₂N— | —CH₂—N(H)— |
| —CH═CH₂ | H₂C═CH— | —CH═CH— |

It is understood that the entries in the first and second member columns may be switched for one another so long as each member is in the same row.

### III. iRNA Agents of the Disclosure

[2401] Described herein are iRNA agents that inhibit the expression of a target gene in extrahepatic tissue, e.g., muscle tissue, e.g., skeletal muscle tissue and/or cardiac muscle tissue, or lung tissue. In one embodiment, the iRNA agent includes double stranded ribonucleic acid (dsRNA) molecules for inhibiting the expression of a target gene in a skeletal and/or cardiac muscle cell or tissue, such as a cell or tissue within a subject, e.g., a mammal, such as a human having a muscle disorder or disease, e.g., a skeletal and/or cardiac disorder or disease. Any target gene can be inhibited by the iRNA agents provided herein. In one embodiment, the target gene is any gene involved in a muscle disorder or disease, e.g., a skeletal and/or cardiac muscle disorder or disease. In one embodiment, the iRNA agent includes double stranded ribonucleic acid (dsRNA) molecules for inhibiting the expression of a target gene in a lung tissue, such as a cell or tissue within a subject, e.g., a mammal, such as a human having a muscle disorder or disease, e.g., a lung disorder or disease. Any target gene can be inhibited by the iRNA agents provided herein. In one embodiment, the target gene is any gene involved in a muscle disorder or disease, e.g., a lung disorder or disease.

[2402] Non-limiting examples of skeletal and/or cardiac muscle target genes include any genes involved in a skeletal muscle and/or a cardiac muscle disorder or disease, such as, for example, adrenoceptor beta 1 (ADRB1); calcium voltage-gated channel subunit alpha1 C (CACNA1C); calcium voltage-gated channel subunit alpha1 G (CACNA1G) (T type calcium cchannel); angiotensin II receptor type 1 (AGTR1); Sodium Voltage-Gated Channel Alpha Subunit 2 (SCN2A); Hyperpolarization Activated Cyclic Nucleotide Gated Potassium Channel 1 (HCN1); Hyperpolarization Activated Cyclic Nucleotide Gated Potassium Channel 4 (HCN4); Hyperpolarization Activated Cyclic Nucleotide Gated Potassium Channel 3 (HCN3); Potassium Voltage-Gated Channel Subfamily A Member 5 (KCNA5); Potassium Inwardly Rectifying Channel Subfamily J Member 3 (KCNJ3); Potassium Inwardly Rectifying Channel Subfamily J Member 4 (KCNJ4); phospholamban (PLN); calcium/calmodulin dependent protein kinase II delta (CAMK2D); Phosphodiesterase 1 (PDE1), myostatin (MSTN); Cholinergic Receptor Nicotinic Alpha 1 Subunit (CHRNA1); Cholinergic Receptor Nicotinic Beta 1 Subunit (CHRNB1); Cholinergic Receptor Nicotinic Delta Subunit (CHRND); Cholinergic Receptor Nicotinic Epsilon Subunit (CHRNE); Cholinergic Receptor Nicotinic Gamma Subunit (CHRNG); Collagen Type XIII Alpha 1 Chain (COL13A1); Docking Protein 7 (DOK7); LDL Receptor Related Protein 4 (LRP4); Muscle Associated Receptor Tyrosine Kinase (MUSK); Receptor Associated Protein Of The Synapse (RAPSN); Sodium Voltage-Gated Channel Alpha Subunit 4 (SCN4A); Double Homeobox 4 (DUX4), dystrophy myotonic protein kinase (DMPK), glycogen synthase 1 (GYS1), survival of motor neuron 1 (SMN1), and alpha-glucosidase (GAA).

[2403] Non-limiting examples of lung target genes include any genes involved in a lung disorder or disease, such as, for example, MUC5B, TSLP, IL33, ALOX15, AGER(RAGE), MUC5AC, and STAT6.

[2404] The iRNA agents provided herein comprise a sense strand and an antisense strand and at least one of the strands is modified for targeting delivery to extrahepatic tissue, e.g., muscle tissue, e.g., skeletal muscle tissue and/or cardiac muscle tissue, or lung tissue. In one embodiment, the iRNA agents are modified by conjugation to an alpha-v-beta-6 (αvβ6) integrin ligand.

[2405] By “integrin ligand” is meant any ligand that binds to an integrin or an integrin receptor.

[2406] Integrin ligands comprise binding sequences that are recognized and bound by integrins or integrin receptors. Various ligands, including peptides and small molecules, which bind αvβ6 integrins or αvβ6 integrin receptors (αvβ6 integrin ligands) have been designed and synthesized herein and in, e.g., U.S. Pat. No. 6,410,526, the entire contents of which are incorporated herein by reference.

[2407] An exemplary linker to conjugate a αvβ6 integrin ligand to the dsRNA agent is:

[chemical structure]

[2408] Exemplary αvβ6 integrin ligands include:

[chemical structure]

[chemical structure]

[chemical structure]

[2409] In one embodiment, at least one of the strands of the iRNA agent is conjugated to at least one αvβ6 integrin ligand. The iRNA agent may be conjugated to one, two, three, four, or more e tr integrin ligands.

[2410] In some embodiments, the αvβ6 integrin ligand is conjugated to the sense strand. The αvβ6 integrin ligand may be conjugated to the 3′-end of the sense strand, to the 5′-end of the sense strand, or to both the 5-end and the 3′-end of the sense strand.

[2411] In other embodiments, the αvβ6 integrin ligand is conjugated to the antisense strand. The αvβ6 integrin ligand may be conjugated to the 3′-end of the antisense strand, to the 5′-end of the antisense strand, or to both the 5-end and the 3′-end of the antisense strand.

[2412] The dsRNA includes an antisense strand having a region of complementarity which is complementary to at least a part of an mRNA formed in the expression of a target gene. The region of complementarity is about 15-30 nucleotides or less in length. Upon contact with a cell expressing the target gene, the RNAi agent inhibits the expression of the target gene (e.g., a human gene, a primate gene, a non-primate gene) by at least 30% as compared to a similar cell not contacted with the RNAi agent or an RNAi agent not complementary to the target gene. Expression of the gene may be assayed by, for example, a PCR or branched DNA (bDNA)-based method, or by a protein-based method, such as by immunofluorescence analysis, using, for example, western blotting or flowcytometric techniques.

[2413] A dsRNA includes two RNA strands that are complementary and hybridize to form a duplex structure under conditions in which the dsRNA will be used. One strand of a dsRNA (the antisense strand) includes a region of complementarity that is substantially complementary, or fully complementary, to a target sequence. The target sequence can be derived from the sequence of an mRNA formed during the expression of a target gene. The other strand (the sense strand) includes a region that is complementary to the antisense strand, such that the two strands hybridize and form a duplex structure when combined under suitable conditions. As described elsewhere herein and as known in the art, the complementary sequences of a dsRNA can also be contained as self-complementary regions of a single nucleic acid molecule, as opposed to being on separate oligonucleotides.

[2414] Generally, the duplex structure is 15 to 30 base pairs in length, e.g., 15-29, 15-28, 15-27, 15-26, 15-25, 15-24, 15-23, 15-22, 15-21, 15-20, 15-19, 15-18, 15-17, 18-30, 18-29, 18-28, 18-27, 18-26, 18-25, 18-24, 18-23, 18-22, 18-21, 18-20, 19-30, 19-29, 19-28, 19-27, 19-26, 19-25, 19-24, 19-23, 19-22, 19-21, 19-20, 20-30, 20-29, 20-28, 20-27, 20-26, 20-25, 20-24, 20-23, 20-22, 20-21, 21-30, 21-29, 21-28, 21-27, 21-26, 21-25, 21-24, 21-23, or 21-22 base pairs in length. In certain embodiments, the duplex structure is 18 to 25 base pairs in length, e.g., 18-25, 18-24, 18-23, 18-22, 18-21, 18-20, 19-25, 19-24, 19-23, 19-22, 19-21, 19-20, 20-25, 20-24, 20-23, 20-22, 20-21, 21-25, 21-24, 21-23, 21-22, 22-25, 22-24, 22-23, 23-25, 23-24 or 24-25 base pairs in length, for example, 19-21 base pairs in length. Ranges and lengths intermediate to the above recited ranges and lengths are also contemplated to be part of the disclosure.

[2415] Similarly, the region of complementarity to the target sequence is 15 to 30 nucleotides in length, e.g., 15-29, 15-28, 15-27, 15-26, 15-25, 15-24, 15-23, 15-22, 15-21, 15-20, 15-19, 15-18, 15-17, 18-30, 18-29, 18-28, 18-27, 18-26, 18-25, 18-24, 18-23, 18-22, 18-21, 18-20, 19-30, 19-29, 19-28, 19-27, 19-26, 19-25, 19-24, 19-23, 19-22, 19-21, 19-20, 20-30, 20-29, 20-28, 20-27, 20-26, 20-25, 20-24,20-23, 20-22, 20-21, 21-30, 21-29, 21-28, 21-27, 21-26, 21-25, 21-24, 21-23, or 21-22 nucleotides in length, for example 19-23 nucleotides in length or 21-23 nucleotides in length. Ranges and lengths intermediate to the above recited ranges and lengths are also contemplated to be part of the disclosure.

[2416] In some embodiments, the duplex structure is 19 to 30 base pairs in length. Similarly, the region of complementarity to the target sequence is 19 to 30 nucleotides in length.

[2417] In some embodiments, the dsRNA is 15 to 23 nucleotides in length, 19 to 23 nucleotides in length, or 25 to 30 nucleotides in length. In general, the dsRNA is long enough to serve as a substrate for the Dicer enzyme. For example, it is well known in the art that dsRNAs longer than about 21-23 nucleotides can serve as substrates for Dicer. As the ordinarily skilled person will also recognize, the region of an RNA targeted for cleavage will most often be part of a larger RNA molecule, often an mRNA molecule. Where relevant, a “part” of an mRNA target is a contiguous sequence of an mRNA target of sufficient length to allow it to be a substrate for RNAi-directed cleavage (i.e., cleavage through a RISC pathway).

[2418] One of skill in the art will also recognize that the duplex region is a primary functional portion of a dsRNA, e.g., a duplex region of about 15 to 36 base pairs, e.g., 15-36, 15-35, 15-34, 15-33, 15-32, 15-31, 15-30, 15-29, 15-28, 15-27, 15-26, 15-25, 15-24, 15-23, 15-22, 15-21, 15-20, 15-19, 15-18, 15-17, 18-30, 18-29, 18-28, 18-27, 18-26, 18-25, 18-24, 18-23, 18-22, 18-21, 18-20, 19-30, 19-29, 19-28, 19-27, 19-26, 19-25, 19-24, 19-23, 19-22, 19-21, 19-20, 20-30, 20-29, 20-28, 20-27, 20-26, 20-25, 20-24, 20-23, 20-22, 20-21, 21-30, 21-29, 21-28, 21-27, 21-26, 21-25, 21-24, 21-23, or 21-22 base pairs, for example, 19-21 base pairs. Thus, in one embodiment, to the extent that it becomes processed to a functional duplex, of e.g., 15-30 base pairs, that targets a desired RNA for cleavage, an RNA molecule or complex of RNA molecules having a duplex region greater than 30 base pairs is a dsRNA. Thus, an ordinarily skilled artisan will recognize that in one embodiment, a miRNA is a dsRNA. In another embodiment, a dsRNA is not a naturally occurring miRNA. In another embodiment, an RNAi agent useful to target expression or a target gene is not generated in the target cell by cleavage of a larger dsRNA.

[2419] A dsRNA as described herein can further include one or more single-stranded nucleotide overhangs e.g., 1, 2, 3, or 4 nucleotides. A nucleotide overhang can comprise or consist of a nucleotide/nucleoside analog, including a deoxynucleotide/nucleoside. The overhang(s) can be on the sense strand, the antisense strand or any combination thereof. Furthermore, the nucleotide(s) of an overhang can be present on the 5-end, 3′-end or both ends of either an antisense or sense strand of a dsRNA.

[2420] A dsRNA can be synthesized by standard methods known in the art. Double stranded RNAi compounds of the invention may be prepared using a two-step procedure. First, the individual strands of the double stranded RNA molecule are prepared separately. Then, the component strands are annealed. The individual strands of the dsRNA compound can be prepared using solution-phase or solid-phase organic synthesis or both. Organic synthesis offers the advantage that the oligonucleotide strands comprising unnatural or modified nucleotides can be easily prepared. Similarly, single-stranded oligonucleotides of the invention can be prepared using solution-phase or solid-phase organic synthesis or both.

[2421] In one aspect, a dsRNA of the disclosure includes at least two nucleotide sequences, a sense sequence and an antisense sequence. In this aspect, one of the two sequences is complementary to the other of the two sequences, with one of the sequences being substantially complementary to a sequence of an mRNA generated in the expression of a target gene. As such, in this aspect, a dsRNA will include two oligonucleotides, where one oligonucleotide is described as the sense strand (passenger strand), and the second oligonucleotide is described as the corresponding antisense strand (guide strand).

[2422] In one embodiment, the substantially complementary sequences of the dsRNA are contained on separate oligonucleotides. In another embodiment, the substantially complementary sequences of the dsRNA are contained on a single oligonucleotide.

[2423] It will be understood that, although the sequences provided herein may be described as modified or conjugated sequences, the RNA of the RNAi agent of the disclosure e.g., a dsRNA of the disclosure, may comprise any one of the sequences set forth herein that is un-modified, un-conjugated, or modified or conjugated differently than described therein.

[2424] The skilled person is well aware that dsRNAs having a duplex structure of about 20 to 23 base pairs, e.g., 21, base pairs have been hailed as particularly effective in inducing RNA interference (Elbashir et al., (2001) EMBO J., 20:6877-6888). However, others have found that shorter or longer RNA duplex structures can also be effective (Chu and Rana (2007) RNA 14:1714-1719; Kim et al. (2005) Nat Biotech 23:222-226). In the embodiments described above, by virtue of the nature of the oligonucleotide sequences provided herein, dsRNAs described herein can include at least one strand of a length of minimally 21 nucleotides. It can be reasonably expected that shorter duplexes minus only a few nucleotides on one or both ends can be similarly effective as compared to the dsRNAs described above. Hence, dsRNAs having a sequence of at least 15, 16, 17, 18, 19, 20, or more contiguous nucleotides derived from one of the sequences provided herein, and differing in their ability to inhibit the expression of a target gene by not more than 10, 15, 20, 25, 30, 35, 40, 45 or 50% inhibition from a dsRNA comprising the full sequence using the in vitro assay with, e.g., skeletal and/or cardiac muscle cells or lung cells and a 10 nM concentration of the RNA agent and the PCR assay as provided in the examples herein, are contemplated to be within the scope of the present disclosure.

[2425] In addition, the RNA agents described herein identify a site(s) in a target gene mRNA transcript that is susceptible to RISC-mediated cleavage. As such, the present disclosure further features RNAi agents that target within this site(s). As used herein, an RNAi agent is said to “target within” a particular site of an mRNA transcript if the RNAi agent promotes cleavage of the mRNA transcript anywhere within that particular site. Such an RNAi agent will generally include at least about 15 contiguous nucleotides, preferably at least 19 nucleotides, from one of the sequences provided herein coupled to additional nucleotide sequences taken from the region contiguous to the selected sequence in a target gene.

### III. Modifications of the RNAi Agents of the Invention

[2426] In one embodiment, the RNA of an RNAi agent of the disclosure, e.g., a dsRNA, is chemically modified to enhance stability or other beneficial characteristics. In certain embodiments of the disclosure, substantially all of the nucleotides of an RNAi agent of the disclosure are modified. In other embodiments of the disclosure, all of the nucleotides of an RNAi agent of the disclosure are modified. RNAi agents of the disclosure in which “substantially all of the nucleotides are modified” are largely but not wholly modified and can include not more than 5, 4, 3, 2, or unmodified nucleotides. In still other embodiments of the disclosure, RNAi agents of the disclosure can include not more than 5, 4, 3, 2 or 1 modified nucleotides.

[2427] The nucleic acids featured in the disclosure can be synthesized or modified by methods well established in the art, such as those described in “Current protocols in nucleic acid chemistry,” Beaucage, S. L. et al. (Edrs.), John Wiley & Sons, Inc., New York, NY, USA, which is hereby incorporated herein by reference. Modifications include, for example, end modifications, e.g., 5′-end modifications (phosphorylation, conjugation, inverted linkages) or 3′-end modifications (conjugation, DNA nucleotides, inverted linkages, etc.); base modifications, e.g., replacement with stabilizing bases, destabilizing bases, or bases that base pair with an expanded repertoire of partners, removal of bases (abasic nucleotides), or conjugated bases; sugar modifications (e.g., at the 2′-position or 4′-position) or replacement of the sugar; or backbone modifications, including modification or replacement of the phosphodiester linkages. Specific examples of RNAi agents useful in the embodiments described herein include, but are not limited to, RNAs containing modified backbones or no natural internucleoside linkages. RNAs having modified backbones include, among others, those that do not have a phosphorus atom in the backbone. For the purposes of this specification, and as sometimes referenced in the art, modified RNAs that do not have a phosphorus atom in their internucleoside backbone can also be considered to be oligonucleosides. In some embodiments, a modified RNAi agent will have a phosphorus atom in its internucleoside backbone.

[2428] Modified RNA backbones include, for example, phosphorothioates, chiral phosphorothioates, phosphorodithioates, phosphotriesters, aminoalkylphosphotriesters, methyl and other alkyl phosphonates including 3′-alkylene phosphonates and chiral phosphonates, phosphinates, phosphoramidates including 3′-amino phosphoramidate and aminoalkylphosphoramidates, thionophosphoramidates, thionoalkylphosphonates, thionoalkylphosphotriesters, and boranophosphates having normal 3′-5′ linkages, 2′-5′-linked analogs of these, and those having inverted polarity wherein the adjacent pairs of nucleoside units are linked 3′-5′ to 5′-3′ or 2′-5′ to 5′-2′. Various salts, mixed salts and free acid forms are also included. In some embodiments of the invention, the dsRNA agents of the invention are in a free acid form. In other embodiments of the invention, the dsRNA agents of the invention are in a salt form. In one embodiment, the dsRNA agents of the invention are in a sodium salt form. In certain embodiments, when the dsRNA agents of the invention are in the sodium salt form, sodium ions are present in the agent as counterions for substantially all of the phosphodiester and/or phosphorothioate groups present in the agent. Agents in which substantially all of the phosphodiester and/or phosphorothioate linkages have a sodium counterion include not more than 5, 4, 3, 2, or 1 phosphodiester and/or phosphorothioate linkages without a sodium counterion. In some embodiments, when the dsRNA agents of the invention are in the sodium salt form, sodium ions are present in the agent as counterions for all of the phosphodiester and/or phosphorothioate groups present in the agent.

[2429] Representative U.S. patents that teach the preparation of the above phosphorus-containing linkages include, but are not limited to, U.S. Pat. Nos. 3,687,808; 4,469,863; 4,476,301; 5,023,243; 5,177,195; 5,188,897; 5,264,423; 5,276,019; 5,278,302; 5,286,717; 5,321,131; 5,399,676; 5,405,939; 5,453,496; 5,455,233; 5,466,677; 5,476,925; 5,519,126; 5,536,821; 5,541,316; 5,550,111; 5,563,253; 5,571,799; 5,587,361; 5,625,050; 6,028,188; 6,124,445; 6,160,109; 6,169,170; 6,172,209; 6,239,265; 6,277,603; 6,326,199; 6,346,614; 6,444,423; 6,531,590; 6,534,639; 6,608,035; 6,683,167; 6,858,715; 6,867,294; 6,878,805; 7,015,315; 7,041,816; 7,273,933; 7,321,029; and U.S. Pat. RE39464, the entire contents of each of which are hereby incorporated herein by reference.

[2430] Modified RNA backbones that do not include a phosphorus atom therein have backbones that are formed by short chain alkyl or cycloalkyl internucleoside linkages, mixed heteroatoms and alkyl or cycloalkyl internucleoside linkages, or one or more short chain heteroatomic or heterocyclic internucleoside linkages. These include those having morpholino linkages (formed in part from the sugar portion of a nucleoside); siloxane backbones; sulfide, sulfoxide and sulfone backbones; formacetyl and thioformacetyl backbones; methylene formacetyl and thioformacetyl backbones; alkene containing backbones; sulfamate backbones; methyleneimino and methylenehydrazino backbones; sulfonate and sulfonamide backbones; amide backbones; and others having mixed N, O, S and CH₂ component parts.

[2431] Representative U.S. patents that teach the preparation of the above oligonucleosides include, but are not limited to, U.S. Pat. Nos. 5,034,506; 5,166,315; 5,185,444; 5,214,134; 5,216,141; 5,235,033; 5,64,562; 5,264,564; 5,405,938; 5,434,257; 5,466,677; 5,470,967; 5,489,677; 5,541,307; 5,561,225; 5,596,086; 5,602,240; 5,608,046; 5,610,289; 5,618,704; 5,623,070; 5,663,312; 5,633,360; 5,677,437; and, 5,677,439, the entire contents of each of which are hereby incorporated herein by reference.

[2432] In other embodiments, suitable RNA mimetics are contemplated for use in RNAi agents, in which both the sugar and the internucleoside linkage, i.e., the backbone, of the nucleotide units are replaced with alternate groups. The nucleobase units are maintained for hybridization with an appropriate nucleic acid target compound. One such oligomeric compound, a RNA mimetic that has been shown to have excellent hybridization properties, is referred to as a peptide nucleic acid (PNA).

[2433] In PNA compounds, the sugar backbone of an RNA is replaced with an amide containing backbone, in particular an aminoethylglycine backbone. The nucleobases are retained and are bound directly or indirectly to aza nitrogen atoms of the amide portion of the backbone. Representative U.S. patents that teach the preparation of PNA compounds include, but are not limited to, U.S. Pat. Nos. 5,539,082; 5,714,331; and 5,719,262, the entire contents of each of which are hereby incorporated herein by reference. Additional PNA compounds suitable for use in the RNAi agents of the disclosure are described in, for example, in Nielsen et al., Science, 1991, 254, 1497-1500.

[2434] Some embodiments featured in the disclosure include RNAs with phosphorothioate backbones and oligonucleosides with heteroatom backbones, and in particular —CH₂—NH—CH₂—, —CH₂—N(CH₃)—O—CH₂— [known as a methylene (methylimino) or MMI backbone], —CH₂—O—N(CH₃)—CH₂—, —CH₂—N(CH₃)—N(CH₃)—CH₂— and —N(CH₃)—CH₂—CH₂— of the above-referenced U.S. Pat. No. 5,489,677, and the amide backbones of the above-referenced U.S. Pat. No. 5,602,240. In some embodiments, the RNAs featured herein have morpholino backbone structures of the above-referenced U.S. Pat. No. 5,034,506. The native phosphodiester backbone can be represented as —O—P(O)(OH)—OCH₂—.

[2435] Modified RNAs can also contain one or more substituted sugar moieties. The RNAi agents, e.g., dsRNAs, featured herein can include one of the following at the 2′-position: OH; F; O-, S-, or N-alkyl; O-, S-, or N-alkenyl; O-, S- or N-alkynyl; or O-alkyl-O-alkyl, wherein the alkyl, alkenyl and alkynyl can be substituted or unsubstituted C₁ to C₁₀ alkyl or C₂ to C₁₀ alkenyl and alkynyl. Exemplary suitable modifications include O[(CH₂)ₙO]ₘCH₃, O(CH₂)ₙOCH₃, O(CH₂)ₙNH₂, O(CH₂)ₙCH₃, O(CH₂)ₙONH₂, and O(CH₂)ₙON[(CH₂)ₙCH₃)]₂, where n and m are from 1 to about 10. In other embodiments, dsRNAs include one of the following at the 2′ position: C₁ to C₁₀ alkyl, substituted alkyl, alkaryl, aralkyl, O-alkaryl or O-aralkyl, SH, SCH₃, OCN, Cl, Br, CN, CF₃, OCF₃, SOCH₃, SO₂CH₃, ONO₂, NO₂, N₃, NH₂, heterocycloalkyl, heterocycloalkaryl, aminoalkylamino, polyalkylamino, substituted silyl, an RNA cleaving group, a reporter group, an intercalator, a group for improving the pharmacokinetic properties of an RNAi agent, or a group for improving the pharmacodynamic properties of an RNAi agent, and other substituents having similar properties. In some embodiments, the modification includes a 2′-methoxyethoxy (2′-O—CH₂CH₂OCH₃, also known as 2′-O-(2-methoxyethyl) or 2′-MOE) (Martin et al., Helv. Chim. Acta, 1995, 78:486-504) i.e., an alkoxy-alkoxy group. Another exemplary modification is 2′-dimethylaminooxyethoxy, i.e., a O(CH₂)₂₀N(CH₃)₂ group, also known as 2′-DMAOE, as described in examples herein below, and 2′-dimethylaminoethoxyethoxy (also known in the art as 2′-O-dimethylaminoethoxyethyl or 2′-DMAEOE), i.e., 2′-O—CH₂—O—CH₂—N(CH₃)₂. Further exemplary modifications include: 5′-Me-2′-F nucleotides, 5′-Me-2′-OMe nucleotides, 5′-Me-2′-deoxynucleotides, (both R and S isomers in these three families); 2′-alkoxyalkyl; and 2′-NMA (N-methylacetamide).

[2436] Other modifications include 2′-methoxy (2′-OCH₃), 2′-aminopropoxy (2′-OCH₂CH₂CH₂NH₂), 2′-O-hexadecyl, and 2′-fluoro (2′-F). Similar modifications can also be made at other positions on the RNA of an RNAi agent, particularly the 3′ position of the sugar on the 3′ terminal nucleotide or in 2′-5′ linked dsRNAs and the 5′ position of 5′ terminal nucleotide. RNAi agents can also have sugar mimetics such as cyclobutyl moieties in place of the pentofuranosyl sugar. Representative U.S. patents that teach the preparation of such modified sugar structures include, but are not limited to, U.S. Pat. Nos. 4,981,957; 5,118,800; 5,319,080; 5,359,044; 5,393,878; 5,446,137; 5,466,786; 5,514,785; 5,519,134; 5,567,811; 5,576,427; 5,591,722; 5,597,909; 5,610,300; 5,627,053; 5,639,873; 5,646,265; 5,658,873; 5,670,633; and 5,700,920, certain of which are commonly owned with the instant application. The entire contents of each of the foregoing are hereby incorporated herein by reference.

[2437] An RNAi agent of the disclosure can also include nucleobase (often referred to in the art simply as “base”) modifications or substitutions. As used herein, “unmodified” or “natural” nucleobases include the purine bases adenine (A) and guanine (G), and the pyrimidine bases thymine (T), cytosine (C) and uracil (U). Modified nucleobases include other synthetic and natural nucleobases such as 5-methylcytosine (5-me-C), 5-hydroxymethyl cytosine, xanthine, hypoxanthine, 2-aminoadenine, 6-methyl and other alkyl derivatives of adenine and guanine, 2-propyl and other alkyl derivatives of adenine and guanine, 2-thiouracil, 2-thiothymine and 2-thiocytosine, 5-halouracil and cytosine, 5-propynyl uracil and cytosine, 6-azo uracil, cytosine and thymine, 5-uracil (pseudouracil), 4-thiouracil, 8-halo, 8-amino, 8-thiol, 8-thioalkyl, 8-hydroxyl anal other 8-substituted adenines and guanines, 5-halo, particularly 5-bromo, 5-trifluoromethyl and other 5-substituted uracils and cytosines, 7-methylguanine and 7-methyladenine, 8-azaguanine and 8-azaadenine, 7-deazaguanine and 7-daazaadenine and 3-deazaguanine and 3-deazaadenine. Further modified nucleobases include those disclosed in U.S. Pat. No. 3,687,808, those disclosed in Modified Nucleosides in Biochemistry, Biotechnology and Medicine, Herdewijn, P. ed. Wiley-VCH, 2008; those disclosed in The Concise Encyclopedia Of Polymer Science And Engineering, pages 858-859, Kroschwitz, J. L, ed. John Wiley & Sons, 1990, these disclosed by Englisch et al., (1991) Angewandte Chemie, International Edition, 30:613, and those disclosed by Sanghvi, Y S., Chapter 15, dsRNA Research and Applications, pages 289-302, Crooke, S. T. and Lebleu, B., Ed., CRC Press, 1993. Certain of these modified nucleobases are particularly useful for increasing the binding affinity of the oligomeric compounds featured in the disclosure. These include 5-substituted pyrimidines, 6-azapyrimidines and N-2, N-6 and O-6 substituted purines, including 2-aminopropyladenine, 5-propynyluracil and 5-propynylcytosine. 5-methylcytosine substitutions have been shown to increase nucleic acid duplex stability by 0.6-1.2° C. (Sanghvi, Y. S., Crooke, S. T. and Lebleu, B., Eds., dsRNA Research and Applications, CRC Press, Boca Raton, 1993, pp. 276-278) and are exemplary base substitutions, even more particularly when combined with 2′-O-methoxyethyl sugar modifications.

[2438] Representative U.S. patents that teach the preparation of certain of the above noted modified nucleobases as well as other modified nucleobases include, but are not limited to, the above noted U.S. Pat. Nos. 3,687,808, 4,845,205; 5,130,302; 5,134,066; 5,175,273; 5,367,066; 5,432,272; 5,457,187; 5,459,255; 5,484,908; 5,502,177; 5,525,711; 5,552,540; 5,587,469; 5,594,121, 5,596,091; 5,614,617; 5,681,941; 5,750,692; 6,015,886; 6,147,200; 6,166,197; 6,222,025; 6,235,887; 6,380,368; 6,528,640; 6,639,062; 6,617,438; 7,045,610; 7,427,672; and 7,495,088, the entire contents of each of which are hereby incorporated herein by reference.

[2439] An RNAi agent of the disclosure can also be modified to include one or more bicyclic sugar moieties. A “bicyclic sugar” is a furanosyl ring modified by the bridging of two atoms. A “bicyclic nucleoside” (“BNA”) is a nucleoside having a sugar moiety comprising a bridge connecting two carbon atoms of the sugar ring, thereby forming a bicyclic ring system. In certain embodiments, the bridge connects the 4′-carbon and the 2′-carbon of the sugar ring. Thus, in some embodiments an agent of the disclosure may include one or more locked nucleic acids (LNA). A locked nucleic acid is a nucleotide having a modified ribose moiety in which the ribose moiety comprises an extra bridge connecting the 2′ and 4′ carbons. In other words, an LNA is a nucleotide comprising a bicyclic sugar moiety comprising a 4′-CH₂—O-2′ bridge. This structure effectively “locks” the ribose in the 3′-endo structural conformation. The addition of locked nucleic acids to siRNAs has been shown to increase siRNA stability in serum, and to reduce off-target effects (Elmen, J. et al., (2005) Nucleic Acids Research 33(1):439-447; Mook, O R. et al., (2007) Mol Canc Ther 6(3):833-843; Grunweller, A. et al., (2003) Nucleic Acids Research 31(12):3185-3193). Examples of bicyclic nucleosides for use in the polynucleotides of the disclosure include without limitation nucleosides comprising a bridge between the 4′ and the 2′ ribosyl ring atoms. In certain embodiments, the antisense polynucleotide agents of the disclosure include one or more bicyclic nucleosides comprising a 4′ to 2′ bridge. Examples of such 4′ to 2′ bridged bicyclic nucleosides, include but are not limited to 4′-(CH₂)—O-2′ (LNA); 4′-(CH₂)—S-2′; 4′-(CH₂)₂—O-2′ (ENA); 4′-CH(CH₃)—O-2′ (also referred to as “constrained ethyl” or “cEt”) and 4′-CH(CH₂OCH₃)—O-2′ (and analogs thereof; see, e.g., U.S. Pat. No. 7,399,845); 4′-C(CH₃)(CH₃)—O-2′ (and analogs thereof; see e.g., U.S. Pat. No. 8,278,283); 4′-CH₂—N(OCH₃)-2′ (and analogs thereof; see e.g., U.S. Pat. No. 8,278,425); 4′-CH₂—O—N(CH₃)-2′ (see, e.g., U.S. Patent Publication No. 2004/0171570); 4′-CH₂—N(R)—O-2′, wherein R is H, C₁-C₁₂ alkyl, or a protecting group (see, e.g., U.S. Pat. No. 7,427,672); 4′-CH₂—C(H)(CH₃)-2′ (see, e.g., Chattopadhyaya et al., J. Org. Chem., 2009, 74, 118-134); and 4′-CH₂—C(═CH₂)-2′ (and analogs thereof; see, e.g., U.S. Pat. No. 8,278,426). The entire contents of each of the foregoing are hereby incorporated herein by reference.

[2440] Additional representative US patents and US patent Publications that teach the preparation of locked nucleic acid nucleotides include, but are not limited to, the following: U.S. Pat. Nos. 6,268,490; 6,525,191; 6,670,461; 6,770,748; 6,794,499; 6,998,484; 7,053,207; 7,034,133; 7,084,125; 7,399,845; 7,427,672; 7,569,686; 7,741,457; 8,022,193; 8,030,467; 8,278,425; 8,278,426; 8,278,283; US 2008/0039618; and US 2009/0012281, the entire contents of each of which are hereby incorporated herein by reference.

[2441] Any of the foregoing bicyclic nucleosides can be prepared having one or more stereochemical sugar configurations including for example α-L-ribofuranose and β-D-ribofuranose (see WO 99/14226).

[2442] An RNAi agent of the disclosure can also be modified to include one or more constrained ethyl nucleotides. As used herein, a “constrained ethyl nucleotide” or “cEt” is a locked nucleic acid comprising a bicyclic sugar moiety comprising a 4′-CH(CH₃)—O-2′ bridge. In one embodiment, a constrained ethyl nucleotide is in the S conformation referred to herein as “S-cEt.”

[2443] An RNAi agent of the disclosure may also include one or more “conformationally restricted nucleotides” (“CRN”). CRN are nucleotide analogs with a linker connecting the C2′ and C4′ carbons of ribose or the C3 and -C5′ carbons of ribose. CRN lock the ribose ring into a stable conformation and increase the hybridization affinity to mRNA. The linker is of sufficient length to place the oxygen in an optimal position for stability and affinity resulting in less ribose ring puckering.

[2444] Representative publications that teach the preparation of certain of the above noted CRN include, but are not limited to, US 2013/0190383; and WO 2013/036868, the entire contents of each of which are hereby incorporated herein by reference.

[2445] In some embodiments, an RNAi agent of the disclosure comprises one or more monomers that are UNA (unlocked nucleic acid) nucleotides. UNA is unlocked acyclic nucleic acid, wherein any of the bonds of the sugar has been removed, forming an unlocked “sugar” residue. In one example, UNA also encompasses monomer with bonds between C1′-C4′ have been removed (i.e. the covalent carbon-oxygen-carbon bond between the C1′ and C4′ carbons). In another example, the C2′-C3′ bond (i.e. the covalent carbon-carbon bond between the C2′ and C3′ carbons) of the sugar has been removed (see Nuc. Acids Symp. Series, 52, 133-134 (2008) and Fluiter et al., Mol. Biosyst., 2009, 10, 1039 hereby incorporated by reference).

[2446] Representative U.S. publications that teach the preparation of UNA include, but are not limited to, U.S. Pat. No. 8,314,227; and US Patent Publication Nos. 2013/0096289; 2013/0011922; and
[2447] 2011/0313020, the entire contents of each of which are hereby incorporated herein by reference.

[2448] An RNAi agent of the disclosure may also include one or more “cyclohexene nucleic acids” or (“CeNA”). CeNA are nucleotide analogs with a replacement of the furanose moiety of DNA by a cyclohexene ring. Incorporation of cylcohexenyl nucleosides in a DNA chain increases the stability of a DNA/RNA hybrid. CeNA is stable against degradation in serum and a CeNA/RNA hybrid is able to activate E. Coli RNase H, resulting in cleavage of the RNA strand. (see Wang et al., Am. Chem. Soc. 2000, 122, 36, 8595-8602, hereby incorporated by reference).

[2449] Potentially stabilizing modifications to the ends of RNA molecules can include N-(acetylaminocaproyl)-4-hydroxyprolinol (Hyp-C6-NHAc), N-(caproyl-4-hydroxyprolinol (Hyp-C6), N-(acetyl-4-hydroxyprolinol (Hyp-NHAc), thymidine-2′-O-deoxythymidine (ether), N-(aminocaproyl)-4-hydroxyprolinol (Hyp-C6-amino), 2-docosanoyl-uridine-3″-phosphate, inverted base dT(idT) and others. Disclosure of this modification can be found in WO 2011/005861.

[2450] Other potentially stabilizing modifications to the ends of RNA molecules include inverted nucleotides, including inverted abasic nucleotides. In one embodiment, each end of a nucleotide comprises an inverted abasic nucleotide, e.g., a 3′->3′ linked nucleotide at the 3′-end of the oligonucleotide and a 5′->5′ linked nucleotide at the 5′-end of the oligonucleotide. In each instance, independently, the inverted abasic nucleotide can be linked via a phosphodiester or phosphothioate internucleotide linkage. Other modifications of an RNAi agent of the disclosure include a 5′ phosphate or 5′ phosphate mimic, e.g., a 5′-terminal phosphate or phosphate mimic on the antisense strand of an RNAi agent. Suitable phosphate mimics are disclosed in, for example US 2012/0157511, the entire contents of which are incorporated herein by reference.

### A. Modified RNAi Agents Comprising Motifs of the Invention

[2451] In certain aspects of the disclosure, the double-stranded RNAi agents of the disclosure include agents with chemical modifications as disclosed, for example, in WO 2013/075035, the entire contents of which are incorporated herein by reference. As shown herein and in WO 2013/075035, a superior result may be obtained by introducing one or more motifs of three identical modifications on three consecutive nucleotides into a sense strand or antisense strand of an RNAi agent, particularly at or near the cleavage site. In some embodiments, the sense strand and antisense strand of the RNAi agent may otherwise be completely modified. The introduction of these motifs interrupts the modification pattern, if present, of the sense or antisense strand. The RNAi agent may be optionally modified with a (S)-glycol nucleic acid (GNA) modification, for instance on one or more residues of the antisense strand. The resulting RNAi agents present superior gene silencing activity.

[2452] Accordingly, the disclosure provides double stranded RNAi agents capable of inhibiting the expression of a target gene in vivo. The RNAi agent comprises a sense strand and an antisense strand. Each strand of the RNAi agent may be 15-30 nucleotides in length. For example, each strand may be 16-30 nucleotides in length, 17-30 nucleotides in length, 25-30 nucleotides in length, 27-30 nucleotides in length, 17-23 nucleotides in length, 17-21 nucleotides in length, 17-19 nucleotides in length, 19-25 nucleotides in length, 19-23 nucleotides in length, 19-21 nucleotides in length, 21-25 nucleotides in length, or 21-23 nucleotides in length. In certain embodiments, each strand is 19-23 nucleotides in length.

[2453] The sense strand and antisense strand typically form a duplex double stranded RNA (“dsRNA”), also referred to herein as an “RNAi agent.” The duplex region of an RNAi agent may be 15-30 nucleotide pairs in length. For example, the duplex region can be 16-30 nucleotide pairs in length, 17-30 nucleotide pairs in length, 27-30 nucleotide pairs in length, 17-23 nucleotide pairs in length, 17-21 nucleotide pairs in length, 17-19 nucleotide pairs in length, 19-25 nucleotide pairs in length, 19-23 nucleotide pairs in length, 19-21 nucleotide pairs in length, 21-25 nucleotide pairs in length, or 21-23 nucleotide pairs in length. In another example, the duplex region is selected from 15, 16, 17, 18, 19, 20, 21, 22, 23, 24, 25, 26, and 27 nucleotides in length. In another embodiment, the duplex region is 19-21 nucleotide pairs in length.

[2454] In one embodiment, the RNAi agent may contain one or more overhang regions or capping groups at the 3′-end, 5′-end, or both ends of one or both strands. The overhang can be 1-6 nucleotides in length, for instance 2-6 nucleotides in length, 1-5 nucleotides in length, 2-5 nucleotides in length, 1-4 nucleotides in length, 2-4 nucleotides in length, 1-3 nucleotides in length, 2-3 nucleotides in length, or 1-2 nucleotides in length. In another embodiment, the nucleotide overhang region is 2 nucleotides in length. The overhangs can be the result of one strand being longer than the other, or the result of two strands of the same length being staggered. The overhang can form a mismatch with the target mRNA or it can be complementary to the gene sequences being targeted or can be another sequence. The first and second strands can also be joined, e.g., by additional bases to form a hairpin, or by other non-base linkers.

[2455] In one embodiment, the nucleotides in the overhang region of the RNAi agent can each independently be a modified or unmodified nucleotide including, but no limited to 2′-sugar modified, such as, 2-F, 2′-O-methyl, thymidine (T), and any combinations thereof.

[2456] For example, TT can be an overhang sequence for either end on either strand. The overhang can form a mismatch with the target mRNA or it can be complementary to the gene sequences being targeted or can be another sequence.

[2457] The 5′- or 3′-overhangs at the sense strand, antisense strand or both strands of the RNAi agent may be phosphorylated. In some embodiments, the overhang region(s) contains two nucleotides having a phosphorothioate between the two nucleotides, where the two nucleotides can be the same or different. In one embodiment, the overhang is present at the 3′-end of the sense strand, antisense strand, or both strands. In one embodiment, this 3′-overhang is present in the antisense strand. In one embodiment, this 3′-overhang is present in the sense strand.

[2458] The dsRNAi agent may contain only a single overhang, which can strengthen the interference activity of the RNAi, without affecting its overall stability. For example, the single-stranded overhang may be located at the 3-terminal end of the sense strand or, alternatively, at the 3-terminal end of the antisense strand. The RNAi may also have a blunt end, located at the 5′-end of the antisense strand (i.e., the 3′-end of the sense strand) or vice versa. Generally, the antisense strand of the RNAi has a nucleotide overhang at the 3′-end, and the 5′-end is blunt. While not wishing to be bound by theory, the asymmetric blunt end at the 5′-end of the antisense strand and 3′-end overhang of the antisense strand favor the guide strand loading into RISC process.

[2459] In one embodiment, the RNAi agent is a double blunt-ended of 19 nucleotides in length, wherein the sense strand contains at least one motif of three 2′-F modifications on three consecutive nucleotides at positions 7, 8, and 9 from the 5′ end. The antisense strand contains at least one motif of three 2′-O-methyl modifications on three consecutive nucleotides at positions 11, 12, and 13 from the 5′ end.

[2460] In another embodiment, the RNAi agent is a double blunt-ended of 20 nucleotides in length, wherein the sense strand contains at least one motif of three 2′-F modifications on three consecutive nucleotides at positions 8, 9, and 10 from the 5′ end. The antisense strand contains at least one motif of three 2′-O-methyl modifications on three consecutive nucleotides at positions 11, 12, and 13 from the 5′ end.

[2461] In yet another embodiment, the RNAi agent is a double blunt-ended of 21 nucleotides in length, wherein the sense strand contains at least one motif of three 2′-F modifications on three consecutive nucleotides at positions 9, 10, and 11 from the 5′ end. The antisense strand contains at least one motif of three 2′-O-methyl modifications on three consecutive nucleotides at positions 11, 12, and 13 from the 5′ end.

[2462] In one embodiment, the RNAi agent comprises a 21 nucleotide sense strand and a 23 nucleotide antisense strand, wherein the sense strand contains at least one motif of three 2′-F modifications on three consecutive nucleotides at positions 9, 10, and 11 from the 5′ end; the antisense strand contains at least one motif of three 2′-O-methyl modifications on three consecutive nucleotides at positions 11, 12, and 13 from the 5′ end, wherein one end of the RNAi agent is blunt, while the other end comprises a 2 nucleotide overhang. Preferably, the 2 nucleotide overhang is at the 3′-end of the antisense strand.

[2463] When the 2 nucleotide overhang is at the 3′-end of the antisense strand, there may be two phosphorothioate internucleotide linkages between the terminal three 3′-nucleotides of the antisense strand, wherein two of the three nucleotides are the overhang nucleotides, and the third nucleotide is a paired nucleotide next to the overhang nucleotide. In one embodiment, the RNAi agent additionally has two phosphorothioate internucleotide linkages between the terminal three nucleotides at both the 5′-end of the sense strand and at the 5′-end of the antisense strand. In one embodiment, every nucleotide in the sense strand and the antisense strand of the RNAi agent, including the nucleotides that are part of the motifs are modified nucleotides. In one embodiment each residue is independently modified with a 2′-O-methyl or 2′-fluoro, e.g., in an alternating motif.

[2464] In one embodiment, the RNAi agent comprises a sense and an antisense strand, wherein the sense strand is 25-30 nucleotide residues in length, wherein starting from the 5′ terminal nucleotide (position 1) positions 1 to 23 of the first strand comprise at least 8 ribonucleotides; the antisense strand is 36-66 nucleotide residues in length and, starting from the 3′ terminal nucleotide, comprises at least 8 ribonucleotides in the positions paired with positions 1-23 of sense strand to form a duplex; wherein at least the 3′ terminal nucleotide of antisense strand is unpaired with sense strand, and up to 6 consecutive 3′ terminal nucleotides are unpaired with sense strand, thereby forming a 3′ single stranded overhang of 1-6 nucleotides; wherein the 5′ terminus of antisense strand comprises from 10-30 consecutive nucleotides which are unpaired with sense strand, thereby forming a 10-30 nucleotide single stranded 5′ overhang; wherein at least the sense strand 5′ terminal and 3′ terminal nucleotides are base paired with nucleotides of antisense strand when sense and antisense strands are aligned for maximum complementarity, thereby forming a substantially duplexed region between sense and antisense strands; and antisense strand is sufficiently complementary to a target RNA along at least 19 ribonucleotides of antisense strand length to reduce target gene expression when the double stranded nucleic acid is introduced into a mammalian cell; and wherein the sense strand contains at least one motif of three 2′-F modifications on three consecutive nucleotides, where at least one of the motifs occurs at or near the cleavage site. The antisense strand contains at least one motif of three 2′-O-methyl modifications on three consecutive nucleotides at or near the cleavage site.

[2465] In one embodiment, the dsRNAi agent comprises sense and antisense strands, wherein the dsRNAi agent comprises a first strand having a length which is at least 25 and at most 29 nucleotides and a second strand having a length which is at most 30 nucleotides with at least one motif of three 2′-O-methyl modifications on three consecutive nucleotides at position 11, 12, and 13 from the 5′ end; wherein the 3′ end of the first strand and the 5′ end of the second strand form a blunt end and the second strand is 1-4 nucleotides longer at its 3′ end than the first strand, wherein the duplex region which is at least 25 nucleotides in length, and the second strand is sufficiently complementary to a target mRNA along at least 19 nucleotide of the second strand length to reduce target gene expression when the RNAi agent is introduced into a mammalian cell, and wherein dicer cleavage of the RNAi agent preferentially results in an siRNA comprising the 3′ end of the second strand, thereby reducing expression of the target gene in the mammal. Optionally, the RNAi agent further comprises a ligand.

[2466] In one embodiment, the sense strand of the RNAi agent contains at least one motif of three identical modifications on three consecutive nucleotides, where one of the motifs occurs at the cleavage site in the sense strand.

[2467] In one embodiment, the antisense strand of the RNAi agent can also contain at least one motif of three identical modifications on three consecutive nucleotides, where one of the motifs occurs at or near the cleavage site in the antisense strand.

[2468] For an RNAi agent having a duplex region of 17-23 nucleotide in length, the cleavage site of the antisense strand is typically around the 10, 11 and 12 positions from the 5′-end. Thus the motifs of three identical modifications may occur at the 9, 10, and 11 positions; 10, 11, and 12 positions; 11, 12, and 13 positions; 12, 13, and 14 positions; or 13, 14, and 15 positions of the antisense strand, the count starting from the 1^{st} nucleotide from the 5′-end of the antisense strand, or, the count starting from the 1^{st} paired nucleotide within the duplex region from the 5′-end of the antisense strand. The cleavage site in the antisense strand may also change according to the length of the duplex region of the RNAi from the 5′-end.

[2469] The sense strand of the RNAi agent may contain at least one motif of three identical modifications on three consecutive nucleotides at the cleavage site of the strand; and the antisense strand may have at least one motif of three identical modifications on three consecutive nucleotides at or near the cleavage site of the strand. When the sense strand and the antisense strand form a dsRNA duplex, the sense strand and the antisense strand can be so aligned that one motif of the three nucleotides on the sense strand and one motif of the three nucleotides on the antisense strand have at least one nucleotide overlap, i.e., at least one of the three nucleotides of the motif in the sense strand forms a base pair with at least one of the three nucleotides of the motif in the antisense strand. Alternatively, at least two nucleotides may overlap, or all three nucleotides may overlap.

[2470] In one embodiment, the sense strand of the RNAi agent may contain more than one motif of three identical modifications on three consecutive nucleotides. The first motif may occur at or near the cleavage site of the strand and the other motifs may be a wing modification. The term “wing modification” herein refers to a motif occurring at another portion of the strand that is separated from the motif at or near the cleavage site of the same strand. The wing modification is either adjacent to the first motif or is separated by at least one or more nucleotides. When the motifs are immediately adjacent to each other, then the chemistry of the motifs are distinct from each other and when the motifs are separated by one or more nucleotide than the chemistries can be the same or different. Two or more wing modifications may be present. For instance, when two wing modifications are present, each wing modification may occur at one end relative to the first motif which is at or near cleavage site or on either side of the lead motif.

[2471] Like the sense strand, the antisense strand of the RNAi agent may contain more than one motif of three identical modifications on three consecutive nucleotides, with at least one of the motifs occurring at or near the cleavage site of the strand. This antisense strand may also contain one or more wing modifications in an alignment similar to the wing modifications that may be present on the sense strand.

[2472] In one embodiment, the wing modification on the sense strand or antisense strand of the RNAi agent typically does not include the first one or two terminal nucleotides at the 3′-end, 5′-end or both ends of the strand.

[2473] In another embodiment, the wing modification on the sense strand or antisense strand of the RNAi agent typically does not include the first one or two paired nucleotides within the duplex region at the 3′-end, 5′-end or both ends of the strand.

[2474] When the sense strand and the antisense strand of the RNAi agent each contain at least one wing modification, the wing modifications may fall on the same end of the duplex region, and have an overlap of one, two or three nucleotides.

[2475] When the sense strand and the antisense strand of the RNAi agent each contain at least two wing modifications, the sense strand and the antisense strand can be so aligned that two modifications each from one strand fall on one end of the duplex region, having an overlap of one, two or three nucleotides; two modifications each from one strand fall on the other end of the duplex region, having an overlap of one, two or three nucleotides; two modifications one strand fall on each side of the lead motif, having an overlap of one, two, or three nucleotides in the duplex region.

[2476] In one embodiment, the RNAi agent comprises mismatch(es) with the target, within the duplex, or combinations thereof. The mismatch may occur in the overhang region or the duplex region. The base pair may be ranked on the basis of their propensity to promote dissociation or melting (e.g., on the free energy of association or dissociation of a particular pairing, the simplest approach is to examine the pairs on an individual pair basis, though next neighbor or similar analysis can also be used). In terms of promoting dissociation: A:U is preferred over G:C; G:U is preferred over G:C; and I:C is preferred over G:C (I=inosine). Mismatches, e.g., non-canonical or other than canonical pairings (as described elsewhere herein) are preferred over canonical (A:T, A:U, G:C) pairings; and pairings which include a universal base are preferred over canonical pairings.

[2477] In one embodiment, the RNAi agent comprises at least one of the first 1, 2, 3, 4, or 5 base pairs within the duplex regions from the 5′-end of the antisense strand independently selected from the group of: A:U, G:U, I:C, and mismatched pairs, e.g., non-canonical or other than canonical pairings or pairings which include a universal base, to promote the dissociation of the antisense strand at the 5′-end of the duplex.

[2478] In one embodiment, the nucleotide at the 1 position within the duplex region from the 5′-end in the antisense strand is selected from the group consisting of A, dA, dU, U, and dT. Alternatively, at least one of the first 1, 2 or 3 base pair within the duplex region from the 5′-end of the antisense strand is an AU base pair. For example, the first base pair within the duplex region from the 5′-end of the antisense strand is an AU base pair.

[2479] In another embodiment, the nucleotide at the 3′-end of the sense strand is deoxythimidine (dT). In another embodiment, the nucleotide at the 3′-end of the antisense strand is deoxythimidine (dT). In one embodiment, there is a short sequence of deoxythimidine nucleotides, for example, two dT nucleotides on the 3′-end of the sense or antisense strand.

[2480] In one embodiment, the sense strand sequence may be represented by Formula (I):

[chemical structure]

[2481] wherein:
[2482] i and j are each independently 0 or 1;
[2483] p and q are each independently 0-6;
[2484] each Nₐ independently represents an oligonucleotide sequence comprising 0-25 modified nucleotides, each sequence comprising at least two differently modified nucleotides;
[2485] each N_{b} independently represents an oligonucleotide sequence comprising 0-10 modified nucleotides;
[2486] each nₚ and n_{q} independently represent an overhang nucleotide;
[2487] wherein Nb and Y do not have the same modification; and
[2488] XXX, YYY and ZZZ each independently represent one motif of three identical modifications on three consecutive nucleotides. Preferably YYY is all 2′-F modified nucleotides.

[2489] In one embodiment, the Nₐ or N_{b} comprise modifications of alternating pattern.

[2490] In one embodiment, the YYY motif occurs at or near the cleavage site of the sense strand. For example, when the RNAi agent has a duplex region of 17-23 nucleotides in length, the YYY motif can occur at or the vicinity of the cleavage site (e.g.: can occur at positions 6, 7, 8, 7, 8, 9, 8, 9, 10, 9, 10, 11, 10, 11, 12 or 11, 12, 13) of—the sense strand, the count starting from the 1^{st} nucleotide, from the 5′-end; or optionally, the count starting at the 1^{st} paired nucleotide within the duplex region, from the 5′-end.

[2491] In one embodiment, i is 1 and j is 0, or i is 0 and j is 1, or both i and j are 1. The sense strand can therefore be represented by the following formulas:

[chemical structure]

[2492] When the sense strand is represented by Formula (Ib), N_{b} represents an oligonucleotide sequence comprising 0-10, 0-7, 0-5, 0-4, 0-2 or 0 modified nucleotides.

[2493] Each Nₐ independently can represent an oligonucleotide sequence comprising 2-20, 2-15, or 2-10 modified nucleotides.

[2494] When the sense strand is represented as Formula (Ic), N_{b} represents an oligonucleotide sequence comprising 0-10, 0-7, 0-10, 0-7, 0-5, 0-4, 0-2 or 0 modified nucleotides. Each Nₐ can independently represent an oligonucleotide sequence comprising 2-20, 2-15, or 2-10 modified nucleotides.

[2495] When the sense strand is represented as Formula (Id), each N_{b} independently represents an oligonucleotide sequence comprising 0-10, 0-7, 0-5, 0-4, 0-2 or 0 modified nucleotides. Preferably, N_{b} is 0, 1, 2, 3, 4, 5 or 6. Each Nₐ can independently represent an oligonucleotide sequence comprising 2-20, 2-15, or 2-10 modified nucleotides.

[2496] Each of X, Y and Z may be the same or different from each other.

[2497] In other embodiments, i is 0 and j is 0, and the sense strand may be represented by the formula:

[chemical structure]

[2498] When the sense strand is represented by Formula (Ia), each Nₐ independently can represent an oligonucleotide sequence comprising 2-20, 2-15, or 2-10 modified nucleotides.

[2499] In one embodiment, the antisense strand sequence of the RNAi may be represented by Formula (II):

[chemical structure]

[2500] wherein:
[2501] k and l are each independently 0 or 1;
[2502] p′ and q′ are each independently 0-6;
   each Nₐ′ independently represents an oligonucleotide sequence comprising 0-25 modified nucleotides,
   each sequence comprising at least two differently modified nucleotides;
   each N_{b}′ independently represents an oligonucleotide sequence comprising 0-10 modified nucleotides;
   each nₚ′ and n_{q}′ independently represent an overhang nucleotide;
   wherein N_{b}′ and Y′ do not have the same modification;
   and X′X′X′, Y′Y′Y′ and Z′Z′Z′ each independently represent one motif of three identical modifications on three consecutive nucleotides.
   In one embodiment, the Nₐ′ or N_{b}′ comprise modifications of alternating pattern.

[2503] The Y′Y′Y′ motif occurs at or near the cleavage site of the antisense strand. For example, when the RNAi agent has a duplex region of 17-23 nucleotide in length, the Y′Y′Y′ motif can occur at positions 9, 10, 11; 10, 11, 12; 11, 12, 13; 12, 13, 14; or 13, 14, 15 of the antisense strand, with the count starting from the 1^{st} nucleotide, from the 5′-end; or optionally, the count starting at the 1^{st} paired nucleotide within the duplex region, from the 5′-end. Preferably, the Y′Y′Y′ motif occurs at positions 11, 12, 13.

[2504] In one embodiment, Y′Y′Y′ motif is all 2′-OMe modified nucleotides.

[2505] In one embodiment, k is 1 and 1 is 0, or k is 0 and 1 is 1, or both k and l are 1.

[2506] The antisense strand can therefore be represented by the following formulas:

[chemical structure]

[2507] When the antisense strand is represented by Formula (IIb), N_{b}′ represents an oligonucleotide sequence comprising 0-10, 0-7, 0-10, 0-7, 0-5, 0-4, 0-2 or 0 modified nucleotides. Each Nₐ′ independently represents an oligonucleotide sequence comprising 2-20, 2-15, or 2-10 modified nucleotides.

[2508] When the antisense strand is represented as Formula (IIc), N_{b}′ represents an oligonucleotide sequence comprising 0-10, 0-7, 0-10, 0-7, 0-5, 0-4, 0-2 or 0 modified nucleotides. Each Nₐ′ independently represents an oligonucleotide sequence comprising 2-20, 2-15, or 2-10 modified nucleotides.

[2509] When the antisense strand is represented as Formula (IId), each N_{b}′ independently represents an oligonucleotide sequence comprising 0-10, 0-7, 0-10, 0-7, 0-5, 0-4, 0-2 or 0 modified nucleotides. Each Nₐ′ independently represents an oligonucleotide sequence comprising 2-20, 2-15, or 2-10 modified nucleotides. Preferably, N_{b} is 0, 1, 2, 3, 4, 5 or 6.

[2510] In other embodiments, k is 0 and 1 is 0 and the antisense strand may be represented by the formula:

[chemical structure]

[2511] When the antisense strand is represented as Formula (IIa), each Nₐ′ independently represents an oligonucleotide sequence comprising 2-20, 2-15, or 2-10 modified nucleotides.

[2512] Each of X′, Y′ and Z′ may be the same or different from each other.

[2513] Each nucleotide of the sense strand and antisense strand may be independently modified with LNA, HNA, CeNA, 2′-methoxyethyl, 2′-O-methyl, 2′-O-allyl, 2′-C-allyl, 2′-hydroxyl, or 2′-fluoro.

[2514] For example, each nucleotide of the sense strand and antisense strand is independently modified with 2′-O-methyl or 2′-fluoro. Each X, Y, Z, X′, Y′ and Z′, in particular, may represent a 2′-O-methyl modification or a 2′-fluoro modification.

[2515] In one embodiment, the sense strand of the RNAi agent may contain YYY motif occurring at 9, 10 and 11 positions of the strand when the duplex region is 21 nt, the count starting from the 1^{st} nucleotide from the 5′-end, or optionally, the count starting at the 1^{st} paired nucleotide within the duplex region, from the 5′-end; and Y represents 2′-F modification. The sense strand may additionally contain XXX motif or ZZZ motifs as wing modifications at the opposite end of the duplex region; and XXX and ZZZ each independently represents a 2′-OMe modification or 2′-F modification.

[2516] In one embodiment the antisense strand may contain Y′Y′Y′ motif occurring at positions 11, 12, 13 of the strand, the count starting from the 1^{st} nucleotide from the 5′-end, or optionally, the count starting at the 1^{st} paired nucleotide within the duplex region, from the 5′-end; and Y′ represents 2′-O-methyl modification. The antisense strand may additionally contain X′X′X′ motif or Z′Z′Z′ motifs as wing modifications at the opposite end of the duplex region; and X′X′X′ and Z′Z′Z′ each independently represents a 2′-OMe modification or 2′-F modification.

[2517] The sense strand represented by any one of the above formulas (Ia), (Ib), (Ic), and (Id) forms a duplex with an antisense strand being represented by any one of formulas (IIa), (IIb), (IIc), and (IId), respectively.

[2518] Accordingly, the RNAi agents for use in the methods of the disclosure may comprise a sense strand and an antisense strand, each strand having 14 to 30 nucleotides, the RNAi duplex represented by Formula (III):

[chemical structure]

[2519] wherein:
[2520] i, j, k, and l are each independently 0 or 1;
[2521] p, p′, q, and q′ are each independently 0-6;
[2522] each Nₐ and Nₐ′ independently represents an oligonucleotide sequence comprising 0-25 modified nucleotides, each sequence comprising at least two differently modified nucleotides;
[2523] each N_{b} and N_{b}′ independently represents an oligonucleotide sequence comprising 0-10 modified nucleotides;
[2524] wherein
[2525] each nₚ′, nₚ, n_{q}′, and n_{q}, each of which may or may not be present, independently represents an overhang nucleotide; and
[2526] XXX, YYY, ZZZ, X′X′X′, Y′Y′Y′, and Z′Z′Z′ each independently represent one motif of three identical modifications on three consecutive nucleotides.

[2527] In one embodiment, i is 0 and j is 0; or i is 1 and j is 0; or i is 0 and j is 1; or both i and j are 0; or both i and j are 1. In another embodiment, k is 0 and 1 is 0; or k is 1 and 1 is 0; k is 0 and 1 is 1; or both k and l are 0; or both k and l are 1.

[2528] Exemplary combinations of the sense strand and antisense strand forming an RNAi duplex include the formulas below:

[chemical structure]

[2529] When the RNAi agent is represented by Formula (IIIa), each Nₐ independently represents an oligonucleotide sequence comprising 2-20, 2-15, or 2-10 modified nucleotides.

[2530] When the RNAi agent is represented by Formula (IIIb), each N_{b} independently represents an oligonucleotide sequence comprising 1-10, 1-7, 1-5 or 1-4 modified nucleotides. Each Nₐ independently represents an oligonucleotide sequence comprising 2-20, 2-15, or 2-10 modified nucleotides.

[2531] When the RNAi agent is represented as Formula (IIIc), each N_{b}, N_{b}′ independently represents an oligonucleotide sequence comprising 0-10, 0-7, 0-10, 0-7, 0-5, 0-4, 0-2 or 0 modified nucleotides. Each Nₐ independently represents an oligonucleotide sequence comprising 2-20, 2-15, or 2-10 modified nucleotides.

[2532] When the RNAi agent is represented as Formula (IIId), each N_{b}, N_{b}′ independently represents an oligonucleotide sequence comprising 0-10, 0-7, 0-10, 0-7, 0-5, 0-4, 0-2 or 0 modified nucleotides. Each Nₐ, Nₐ′ independently represents an oligonucleotide sequence comprising 2-20, 2-15, or 2-10 modified nucleotides. Each of Nₐ, Nₐ′, N_{b} and N_{b}′ independently comprises modifications of alternating pattern.

[2533] In one embodiment, when the RNAi agent is represented by Formula (IIId), the Nₐ modifications are 2′-O-methyl or 2′-fluoro modifications. In another embodiment, when the RNAi agent is represented by Formula (IIId), the Nₐ modifications are 2′-O-methyl or 2′-fluoro modifications and nₚ′>0 and at least one nₚ′ is linked to a neighboring nucleotide a via phosphorothioate linkage. In yet another embodiment, when the RNAi agent is represented by Formula (IIId), the Nₐ modifications are 2′-O-methyl or 2′-fluoro modifications, nₚ′>0 and at least one nₚ′ is linked to a neighboring nucleotide via phosphorothioate linkage, and the sense strand is conjugated to one or more ligands attached through a bivalent or trivalent branched linker (described below). In another embodiment, when the RNAi agent is represented by Formula (IIId), the Nₐ modifications are 2′-O-methyl or 2′-fluoro modifications, nₚ′>0 and at least one nₚ′ is linked to a neighboring nucleotide via phosphorothioate linkage, the sense strand comprises at least one phosphorothioate linkage, and the sense strand is conjugated to one or more ligands optionally attached through a bivalent or trivalent branched linker.

[2534] In one embodiment, when the RNAi agent is represented by Formula (IIIa), the Nₐ modifications are 2′-O-methyl or 2′-fluoro modifications, nₚ′>0 and at least one nₚ′ is linked to a neighboring nucleotide via phosphorothioate linkage, the sense strand comprises at least one phosphorothioate linkage, and the sense strand is conjugated to one or more ligands attached through a bivalent or trivalent branched linker.

[2535] In one embodiment, the RNAi agent is a multimer containing at least two duplexes represented by Formula (III), (IIIa), (IIIb), (IIc), and (IIId), wherein the duplexes are connected by a linker. The linker can be cleavable or non-cleavable. Optionally, the multimer further comprises a ligand. Each of the duplexes can target the same gene or two different genes; or each of the duplexes can target same gene at two different target sites.

[2536] In one embodiment, the RNAi agent is a multimer containing three, four, five, six or more duplexes represented by Formula (III), (IIIa), (IIIb), (IIIc), and (IIId), wherein the duplexes are connected by a linker. The linker can be cleavable or non-cleavable. Optionally, the multimer further comprises a ligand. Each of the duplexes can target the same gene or two different genes; or each of the duplexes can target same gene at two different target sites.

[2537] In one embodiment, two RNAi agents represented by Formula (III), (IIIa), (IIIb), (IIIc), and (IIId) are linked to each other at the 5′ end, and one or both of the 3′ ends and are optionally conjugated to a ligand. Each of the agents can target the same gene or two different genes; or each of the agents can target same gene at two different target sites.

[2538] Various publications describe multimeric RNAi agents that can be used in the methods of the disclosure. Such publications include WO2007/091269, WO2010/141511, WO2007/117686, WO2009/014887, and WO2011/031520; and U.S. Pat. No. 7,858,769, the entire contents of each of which are hereby incorporated herein by reference.

[2539] In certain embodiments, the compositions and methods of the disclosure include a vinyl phosphonate (VP) modification of an RNAi agent as described herein. I

[2540] In exemplary embodiments, a 5′-vinyl phosphonate modified nucleotide of the disclosure has the structure:

[chemical structure]

wherein X is O or S (e.g. S);
[2541] R^{P} is hydrogen, hydroxy, fluoro, methoxy, or 2-methoxyethoxy (MOE);
[2542] R^{5′} is ═C(H)—P(O)(OH)₂ and the double bond between the C5′ carbon and R5′ is in the E or Z orientation (e.g., E orientation); and
[2543] B is a nucleobase or a modified nucleobase, optionally where B is adenine, guanine, cytosine, thymine, or uracil (e.g., uracil).

[2544] In one embodiment, R^{5′} is ═C(H)—P(O)(OH)₂ and the double bond between the C5′ carbon and R5′ is in the E orientation.

[2545] In another embodiment, R is methoxy and R^{5′} is ═C(H)—P(O)(OH)₂ and the double bond between the C5′ carbon and R^{5′} is in the E orientation.

[2546] In another embodiment, X is S, R is methoxy, and R^{5′} is ═C(H)—P(O)(OH)₂ and the double bond between the C5′ carbon and R^{5′} is in the E orientation.

[2547] In another embodiment, X is S, R is methoxy, and R^{5′} is ═C(H)—P(O)(OH)₂, the double bond between the C5′ carbon and R^{5′} is in the E orientation, and B is uracil.

[2548] A vinyl phosphonate of the instant disclosure may be attached to either the antisense or the sense strand of a dsRNA of the disclosure. In certain embodiments, a vinyl phosphonate of the instant disclosure is attached to the antisense strand of a dsRNA, at the 5′ end of the antisense strand of the dsRNA.

[2549] Vinyl phosphate modifications are also contemplated for the compositions and methods of the instant disclosure. An exemplary vinyl phosphate structure is:

[chemical structure]

For example, when the phosphate mimic is a 5′-vinyl phosphate, the 5′-terminal nucleotide can have the immediately preceding structure, where the phosphonate group is replaced by a phosphate.
i. Thermally Destabilizing Modifications

[2550] In certain embodiments, a dsRNA molecule can be optimized for RNA interference by incorporating thermally destabilizing modifications in the seed region of the antisense strand. As used herein “seed region” means at positions 2-9 of the 5′-end of the referenced strand. For example, thermally destabilizing modifications can be incorporated in the seed region of the antisense strand to reduce or inhibit off-target gene silencing.

[2551] The term “thermally destabilizing modification(s)” includes modification(s) that would result with a dsRNA with a lower overall melting temperature (Tₘ) than the Tₘ of the dsRNA without having such modification(s). For example, the thermally destabilizing modification(s) can decrease the Tₘ of the dsRNA by 1-4° C., such as one, two, three or four degrees Celsius. And, the term “thermally destabilizing nucleotide” refers to a nucleotide containing one or more thermally destabilizing modifications.

[2552] It has been discovered that dsRNAs with an antisense strand comprising at least one thermally destabilizing modification of the duplex within the first 9 nucleotide positions, counting from the 5′ end, of the antisense strand have reduced off-target gene silencing activity. Accordingly, in some embodiments, the antisense strand comprises at least one (e.g., one, two, three, four, five or more) thermally destabilizing modification of the duplex within the first 9 nucleotide positions of the 5′ region of the antisense strand. In some embodiments, one or more thermally destabilizing modification(s) of the duplex is/are located in positions 2-9, or preferably positions 4-8, from the 5′-end of the antisense strand. In some further embodiments, the thermally destabilizing modification(s) of the duplex is/are located at position 6, 7 or 8 from the 5′-end of the antisense strand. In still some further embodiments, the thermally destabilizing modification of the duplex is located at position 7 from the 5′-end of the antisense strand. In some embodiments, the thermally destabilizing modification of the duplex is located at position 2, 3, 4, 5 or 9 from the 5′-end of the antisense strand.

[2553] The thermally destabilizing modifications can include, but are not limited to, abasic modification; mismatch with the opposing nucleotide in the opposing strand; and sugar modification such as 2′-deoxy modification, a 2′-5′ linked nucleotide (“3′-RNA’), or acyclic nucleotide, e.g., unlocked nucleic acids (UNA) or glycol nucleic acid (GNA).

[2554] Exemplified abasic modifications include, but are not limited to the following:

[chemical structure]

wherein B is a modified or unmodified nucleobase.

[2555] Exemplified sugar modifications include, but are not limited to the following:

[chemical structure]

wherein B is a modified or unmodified nucleobase.

[2556] In some embodiments the thermally destabilizing modification of the duplex is selected from the group consisting of:

[chemical structure]

wherein B is a modified or unmodified nucleobase and the asterisk on each structure represents either R, S or racemic.

[2557] The term “acyclic nucleotide” refers to any nucleotide having an acyclic ribose sugar, for example, where any of bonds between the ribose carbons (e.g., C1′-C2′, C2′-C3′, C3′-C4′, C4′-O4′, or C1′-O4′) is absent or at least one of ribose carbons or oxygen (e.g., C1′, C2′, C3′, C4′ or O4′) are independently or in combination absent from the nucleotide. In some embodiments, acyclic nucleotide

[chemical structure]

wherein B is a modified or unmodified nucleobase, R¹ and R² independently are H, halogen, OR₃, or alkyl; and R₃ is H, alkyl, cycloalkyl, aryl, aralkyl, heteroaryl or sugar). The term “UNA” refers to unlocked acyclic nucleic acid, wherein any of the bonds of the sugar has been removed, forming an unlocked “sugar” residue. In one example, UNA also encompasses monomers with bonds between C1′-C4′ being removed (i.e. the covalent carbon-oxygen-carbon bond between the C1′ and C4′ carbons). In another example, the C2′-C3′ bond (i.e. the covalent carbon-carbon bond between the C2′ and C3′ carbons) of the sugar is removed (see Mikhailov et. al., Tetrahedron Letters, 26 (17): 2059 (1985); and Fluiter et al., Mol. Biosyst., 10: 1039 (2009), which are hereby incorporated by reference in their entirety). The acyclic derivative provides greater backbone flexibility without affecting the Watson-Crick pairings. The acyclic nucleotide can be linked via 2′-5′ or 3′-5′ linkage.

[2558] The term ‘GNA’ refers to glycol nucleic acid which is a polymer similar to DNA or RNA but differing in the composition of its “backbone” in that is composed of repeating glycerol units linked by phosphodiester bonds:

[chemical structure]

[2559] The thermally destabilizing modification of the duplex can be mismatches (i.e., noncomplementary base pairs) between the thermally destabilizing nucleotide and the opposing nucleotide in the opposite strand within the dsRNA duplex. Exemplary mismatch base pairs include G:G, G:A, G:U, G:T, A:A, A:C, C:C, C:U, C:T, U:U, T:T, U:T, or a combination thereof. Other mismatch base pairings known in the art are also amenable to the present invention. A mismatch can occur between nucleotides that are either naturally occurring nucleotides or modified nucleotides, i.e., the mismatch base pairing can occur between the nucleobases from respective nucleotides independent of the modifications on the ribose sugars of the nucleotides. In certain embodiments, the dsRNA molecule contains at least one nucleobase in the mismatch pairing that is a 2′-deoxy nucleobase; e.g., the 2′-deoxy nucleobase is in the sense strand.

[2560] In some embodiments, the thermally destabilizing modification of the duplex in the seed region of the antisense strand includes nucleotides with impaired W—C H-bonding to complementary base on the target mRNA such as:

[chemical structure]

[2561] More examples of abasic nucleotide, acyclic nucleotide modifications (including UNA and GNA), and mismatch modifications have been described in detail in WO 2011/133876, which is herein incorporated by reference in its entirety.

[2562] The thermally destabilizing modifications may also include universal base with reduced or abolished capability to form hydrogen bonds with the opposing bases, and phosphate modifications.

[2563] In some embodiments, the thermally destabilizing modification of the duplex includes nucleotides with non-canonical bases such as, but not limited to, nucleobase modifications with impaired or completely abolished capability to form hydrogen bonds with bases in the opposite strand. These nucleobase modifications have been evaluated for destabilization of the central region of the dsRNA duplex as described in WO 2010/0011895, which is herein incorporated by reference in its entirety. Exemplary nucleobase modifications are:

[chemical structure]

[2564] In some embodiments, the thermally destabilizing modification of the duplex in the seed region of the antisense strand includes one or more α-nucleotide complementary to the base on the target mRNA, such as:

[chemical structure]

wherein R is H, OH, OCH₃, F, NH₂, NHMe, NMe₂ or O-alkyl.

[2565] Exemplary phosphate modifications known to decrease the thermal stability of dsRNA duplexes compared to natural phosphodiester linkages are:

[chemical structure]

[2566] The alkyl for the R group can be a C₁-C₆alkyl. Specific alkyls for the R group include, but are not limited to methyl, ethyl, propyl, isopropyl, butyl, pentyl and hexyl.

[2567] As the skilled artisan will recognize, in view of the functional role of nucleobases is defining specificity of an RNAi agent of the disclosure, while nucleobase modifications can be performed in the various manners as described herein, e.g., to introduce destabilizing modifications into an RNAi agent of the disclosure, e.g., for purpose of enhancing on-target effect relative to off-target effect, the range of modifications available and, in general, present upon RNAi agents of the disclosure tends to be much greater for non-nucleobase modifications, e.g., modifications to sugar groups or phosphate backbones of polyribonucleotides. Such modifications are described in greater detail in other sections of the instant disclosure and are expressly contemplated for RNAi agents of the disclosure, either possessing native nucleobases or modified nucleobases as described above or elsewhere herein.

[2568] In addition to the antisense strand comprising a thermally destabilizing modification, the dsRNA can also comprise one or more stabilizing modifications. For example, the dsRNA can comprise at least two (e.g., two, three, four, five, six, seven, eight, nine, ten or more) stabilizing modifications. Without limitations, the stabilizing modifications all can be present in one strand. In some embodiments, both the sense and the antisense strands comprise at least two stabilizing modifications. The stabilizing modification can occur on any nucleotide of the sense strand or antisense strand. For instance, the stabilizing modification can occur on every nucleotide on the sense strand or antisense strand; each stabilizing modification can occur in an alternating pattern on the sense strand or antisense strand; or the sense strand or antisense strand comprises both stabilizing modification in an alternating pattern. The alternating pattern of the stabilizing modifications on the sense strand may be the same or different from the antisense strand, and the alternating pattern of the stabilizing modifications on the sense strand can have a shift relative to the alternating pattern of the stabilizing modifications on the antisense strand.

[2569] In some embodiments, the antisense strand comprises at least two (e.g., two, three, four, five, six, seven, eight, nine, ten or more) stabilizing modifications. Without limitations, a stabilizing modification in the antisense strand can be present at any positions. In some embodiments, the antisense comprises stabilizing modifications at positions 2, 6, 8, 9, 14, and 16 from the 5′-end. In some other embodiments, the antisense comprises stabilizing modifications at positions 2, 6, 14, and 16 from the 5′-end. In still some other embodiments, the antisense comprises stabilizing modifications at positions 2, 14, and 16 from the 5′-end. In each of the preceding, the stabilizing modification can be a 2′-fluoro modification.

[2570] In some other embodiments, the antisense comprises 2′-H modifications (DNA) at positions 2, 5, 7, 12, 14, and 16 from the 5′-end of the antisense strand. In still some other embodiments, the antisense comprises 2′-H modifications (DNA) at positions 2, 5, 7, and 12 from the 5′-end, and a 2′-fluoro modification at position 14 from the 5′-end of the antisense strand. In other embodiments, the antisense strand is paired to a sense strand having 2′-fluoro modifications at positions 9, 10, and 11 from the 5′-end of the sense strand (or opposite to positions 11, 12, and 13 of the antisense strand). In other embodiments, the antisense strand is paired to a sense strand having 2′-fluoro modifications at positions 7, 9, 10, and 11 from the 5′-end of the sense strand (or opposite to positions 11, 12, 13, and 15 of the antisense strand).

[2571] In some embodiments, the antisense strand comprises at least one stabilizing modification adjacent to the destabilizing modification. For example, the stabilizing modification can be the nucleotide at the 5′-end or the 3′-end of the destabilizing modification, i.e., at position -1 or +1 from the position of the destabilizing modification. In some embodiments, the antisense strand comprises a stabilizing modification at each of the 5′-end and the 3′-end of the destabilizing modification, i.e., positions -1 and +1 from the position of the destabilizing modification.

[2572] In some embodiments, the antisense strand comprises at least two stabilizing modifications at the 3′-end of the destabilizing modification, i.e., at positions +1 and +2 from the position of the destabilizing modification.

[2573] In some embodiments, the sense strand comprises at least two (e.g., two, three, four, five, six, seven, eight, nine, ten or more) stabilizing modifications (e.g., 2′-fluoro modifications). Without limitations, a stabilizing modification in the sense strand can be present at any positions. In some embodiments, the sense strand comprises stabilizing modifications at positions 7, 10, and 11 from the 5′-end. In some other embodiments, the sense strand comprises stabilizing modifications at positions 7, 9, 10, and 11 from the 5′-end. In some embodiments, the sense strand comprises stabilizing modifications at positions opposite or complementary to positions 11, 12, and 15 of the antisense strand, counting from the 5′-end of the antisense strand. In some other embodiments, the sense strand comprises stabilizing modifications (e.g., 2′-fluoro modifications) at positions opposite or complementary to positions 11, 12, 13, and 15 of the antisense strand, counting from the 5′-end of the antisense strand. In some embodiments, the sense strand comprises a block of two, three, or four stabilizing modifications.

[2574] In some other embodiments, the sense strand comprises stabilizing modifications (e.g., 2′-fluoro modifications) at positions opposite or complementary to positions 11, 12, and 13 of the antisense strand, counting from the 5′-end of the antisense strand.

[2575] In some embodiments, the sense strand does not comprise a stabilizing modification in position opposite or complementary to the thermally destabilizing modification of the duplex in the antisense strand.

[2576] Exemplary thermally stabilizing modifications include, but are not limited to, 2′-fluoro modifications. Other thermally stabilizing modifications include, but are not limited to, LNA.

[2577] In some embodiments, the dsRNA of the disclosure comprises at least four (e.g., four, five, six, seven, eight, nine, ten, or more) 2′-fluoro nucleotides. Without limitations, the 2′-fluoro nucleotides all can be present in one strand. In some embodiments, both the sense and the antisense strands comprise at least two 2′-fluoro nucleotides. The 2′-fluoro modification can occur on any nucleotide of the sense strand or antisense strand. For instance, the 2′-fluoro modification can occur on every nucleotide on the sense strand or antisense strand; each 2′-fluoro modification can occur in an alternating pattern on the sense strand or antisense strand; or the sense strand or antisense strand comprises both 2′-fluoro modifications in an alternating pattern. The alternating pattern of the 2′-fluoro modifications on the sense strand may be the same or different from the antisense strand, and the alternating pattern of the 2′-fluoro modifications on the sense strand can have a shift relative to the alternating pattern of the 2′-fluoro modifications on the antisense strand.

[2578] In some embodiments, the antisense strand comprises at least two (e.g., two, three, four, five, six, seven, eight, nine, ten, or more) 2′-fluoro nucleotides. Without limitations, a 2′-fluoro modification in the antisense strand can be present at any positions. In some embodiments, the antisense comprises 2′-fluoro nucleotides at positions 2, 6, 8, 9, 14, and 16 from the 5′-end. In some other embodiments, the antisense comprises 2′-fluoro nucleotides at positions 2, 6, 14, and 16 from the 5′-end. In still some other embodiments, the antisense comprises 2′-fluoro nucleotides at positions 2, 14, and 16 from the 5′-end.

[2579] In some embodiments, the antisense strand comprises at least one 2′-fluoro nucleotide adjacent to the destabilizing modification. For example, the 2′-fluoro nucleotide can be the nucleotide at the 5′-end or the 3′-end of the destabilizing modification, i.e., at position -1 or +1 from the position of the destabilizing modification. In some embodiments, the antisense strand comprises a 2′-fluoro nucleotide at each of the 5′-end and the 3′-end of the destabilizing modification, i.e., positions -1 and +1 from the position of the destabilizing modification.

[2580] In some embodiments, the antisense strand comprises at least two 2′-fluoro nucleotides at the 3′-end of the destabilizing modification, i.e., at positions +1 and +2 from the position of the destabilizing modification.

[2581] In some embodiments, the sense strand comprises at least two (e.g., two, three, four, five, six, seven, eight, nine, ten or more) 2′-fluoro nucleotides. Without limitations, a 2′-fluoro modification in the sense strand can be present at any positions. In some embodiments, the antisense comprises 2′-fluoro nucleotides at positions 7, 10, and 11 from the 5′-end. In some other embodiments, the sense strand comprises 2′-fluoro nucleotides at positions 7, 9, 10, and 11 from the 5′-end. In some embodiments, the sense strand comprises 2′-fluoro nucleotides at positions opposite or complementary to positions 11, 12, and 15 of the antisense strand, counting from the 5′-end of the antisense strand. In some other embodiments, the sense strand comprises 2′-fluoro nucleotides at positions opposite or complementary to positions 11, 12, 13, and 15 of the antisense strand, counting from the 5′-end of the antisense strand. In some embodiments, the sense strand comprises a block of two, three or four 2′-fluoro nucleotides.

[2582] In some embodiments, the sense strand does not comprise a 2′-fluoro nucleotide in position opposite or complementary to the thermally destabilizing modification of the duplex in the antisense strand.

[2583] In some embodiments, the dsRNA molecule of the disclosure comprises a 21 nucleotides (nt) sense strand and a 23 nucleotides (nt) antisense, wherein the antisense strand contains at least one thermally destabilizing nucleotide, where the at least one (e.g., only one) thermally destabilizing nucleotide occurs in the seed region of the antisense strand (i.e., at position 2-9 of the 5′-end of the antisense strand), wherein one end of the dsRNA is blunt, while the other end is comprises a 2 nt overhang, and wherein the dsRNA optionally further has at least one (e.g., one, two, three, four, five, six or all seven) of the following characteristics: (i) the antisense comprises 2, 3, 4, 5 or 6 2′-fluoro modifications; (ii) the antisense comprises 1, 2, 3, 4 or 5 phosphorothioate internucleotide linkages; (iii) the sense strand is conjugated with a ligand; (iv) the sense strand comprises 2, 3, 4 or 5 2′-fluoro modifications; (v) the sense strand comprises 1, 2, 3, 4 or 5 phosphorothioate internucleotide linkages; (vi) the dsRNA comprises at least four 2′-fluoro modifications; and (vii) the dsRNA comprises a blunt end at 5′-end of the antisense strand. Preferably, the 2 nt overhang is at the 3′-end of the antisense.

[2584] In some embodiments, the dsRNA molecule of the disclosure comprising a sense and antisense strands, wherein: the sense strand is 25-30 nucleotide residues in length, wherein starting from the 5′ terminal nucleotide (position 1), positions 1 to 23 of said sense strand comprise at least 8 ribonucleotides; antisense strand is 36-66 nucleotide residues in length and, starting from the 3′ terminal nucleotide, at least 8 ribonucleotides in the positions paired with positions 1-23 of sense strand to form a duplex; wherein at least the 3′ terminal nucleotide of antisense strand is unpaired with sense strand, and up to 6 consecutive 3′ terminal nucleotides are unpaired with sense strand, thereby forming a 3′ single stranded overhang of 1-6 nucleotides; wherein the 5′ terminus of antisense strand comprises from 10-30 consecutive nucleotides which are unpaired with sense strand, thereby forming a 10-30 nucleotide single stranded 5′ overhang; wherein at least the sense strand 5′ terminal and 3′ terminal nucleotides are base paired with nucleotides of antisense strand when sense and antisense strands are aligned for maximum complementarity, thereby forming a substantially duplexed region between sense and antisense strands; and antisense strand is sufficiently complementary to a target RNA along at least 19 ribonucleotides of antisense strand length to reduce target gene expression when said double stranded nucleic acid is introduced into a mammalian cell; and wherein the antisense strand contains at least one thermally destabilizing nucleotide, where at least one thermally destabilizing nucleotide is in the seed region of the antisense strand (i.e. at position 2-9 of the 5′-end of the antisense strand). For example, the thermally destabilizing nucleotide occurs between positions opposite or complementary to positions 14-17 of the 5′-end of the sense strand, and wherein the dsRNA optionally further has at least one (e.g., one, two, three, four, five, six or all seven) of the following characteristics: (i) the antisense comprises 2, 3, 4, 5, or 6 2′-fluoro modifications; (ii) the antisense comprises 1, 2, 3, 4, or 5 phosphorothioate internucleotide linkages; (iii) the sense strand is conjugated with a ligand; (iv) the sense strand comprises 2, 3, 4, or 5 2′-fluoro modifications; (v) the sense strand comprises 1, 2, 3, 4, or 5 phosphorothioate internucleotide linkages; and (vi) the dsRNA comprises at least four 2′-fluoro modifications; and (vii) the dsRNA comprises a duplex region of 12-30 nucleotide pairs in length.

[2585] In some embodiments, the dsRNA molecule of the disclosure comprises a sense and antisense strands, wherein said dsRNA molecule comprises a sense strand having a length which is at least 25 and at most 29 nucleotides and an antisense strand having a length which is at most 30 nucleotides with the sense strand comprises a modified nucleotide that is susceptible to enzymatic degradation at position 11 from the 5′ end, wherein the 3′ end of said sense strand and the 5′ end of said antisense strand form a blunt end and said antisense strand is 1-4 nucleotides longer at its 3′ end than the sense strand, wherein the duplex region which is at least 25 nucleotides in length, and said antisense strand is sufficiently complementary to a target mRNA along at least 19 nt of said antisense strand length to reduce target gene expression when said dsRNA molecule is introduced into a mammalian cell, and wherein dicer cleavage of said dsRNA preferentially results in an siRNA comprising said 3′ end of said antisense strand, thereby reducing expression of the target gene in the mammal, wherein the antisense strand contains at least one thermally destabilizing nucleotide, where the at least one thermally destabilizing nucleotide is in the seed region of the antisense strand (i.e. at position 2-9 of the 5′-end of the antisense strand), and wherein the dsRNA optionally further has at least one (e.g., one, two, three, four, five, six or all seven) of the following characteristics: (i) the antisense comprises 2, 3, 4, 5, or 6 2′-fluoro modifications; (ii) the antisense comprises 1, 2, 3, 4, or 5 phosphorothioate internucleotide linkages; (iii) the sense strand is conjugated with a ligand; (iv) the sense strand comprises 2, 3, 4, or 5 2′-fluoro modifications; (v) the sense strand comprises 1, 2, 3, 4, or 5 phosphorothioate internucleotide linkages; and (vi) the dsRNA comprises at least four 2′-fluoro modifications; and (vii) the dsRNA has a duplex region of 12-29 nucleotide pairs in length.

[2586] In some embodiments, every nucleotide in the sense strand and antisense strand of the dsRNA molecule may be modified. Each nucleotide may be modified with the same or different modification which can include one or more alteration of one or both of the non-linking phosphate oxygens or of one or more of the linking phosphate oxygens; alteration of a constituent of the ribose sugar, e.g., of the 2′ hydroxyl on the ribose sugar; wholesale replacement of the phosphate moiety with “dephospho” linkers; modification or replacement of a naturally occurring base; and replacement or modification of the ribose-phosphate backbone.

[2587] As nucleic acids are polymers of subunits, many of the modifications occur at a position which is repeated within a nucleic acid, e.g., a modification of a base, or a phosphate moiety, or a non-linking O of a phosphate moiety. In some cases, the modification will occur at all of the subject positions in the nucleic acid but in many cases it will not. By way of example, a modification may only occur at a 3′ or 5′ terminal position, may only occur in a terminal region, e.g., at a position on a terminal nucleotide or in the last 2, 3, 4, 5, or 10 nucleotides of a strand. A modification may occur in a double strand region, a single strand region, or in both. A modification may occur only in the double strand region of an RNA or may only occur in a single strand region of an RNA. E.g., a phosphorothioate modification at a non-linking O position may only occur at one or both termini, may only occur in a terminal region, e.g., at a position on a terminal nucleotide or in the last 2, 3, 4, 5, or 10 nucleotides of a strand, or may occur in double strand and single strand regions, particularly at termini. The 5′ end or ends can be phosphorylated.

[2588] It may be possible, e.g., to enhance stability, to include particular bases in overhangs, or to include modified nucleotides or nucleotide surrogates, in single strand overhangs, e.g., in a 5′ or 3′ overhang, or in both. E.g., it can be desirable to include purine nucleotides in overhangs. In some embodiments all or some of the bases in a 3′ or 5′ overhang may be modified, e.g., with a modification described herein. Modifications can include, e.g., the use of modifications at the 2′ position of the ribose sugar with modifications that are known in the art, e.g., the use of deoxyribonucleotides, 2′-deoxy-2′-fluoro (2′-F) or 2′-O-methyl modified instead of the ribosugar of the nucleobase, and modifications in the phosphate group, e.g., phosphorothioate modifications. Overhangs need not be homologous with the target sequence.

[2589] In some embodiments, each residue of the sense strand and antisense strand is independently modified with LNA, HNA, F-HNA, CeNA, 2′-methoxyethyl, 2′-O-methyl, 2′-O-allyl, 2′-C-allyl, 2′-deoxy, or 2′-fluoro. The strands can contain more than one modification. In some embodiments, each residue of the sense strand and antisense strand is independently modified with 2′-O-methyl or 2′-fluoro. It is to be understood that these modifications are in addition to the at least one thermally destabilizing modification of the duplex present in the antisense strand.

[2590] At least two different modifications are typically present on the sense strand and antisense strand. Those two modifications may be the 2′-deoxy, 2′-O-methyl or 2′-fluoro modifications, acyclic nucleotides or others. In some embodiments, the sense strand and antisense strand each comprises two differently modified nucleotides selected from 2′-O-methyl or 2′-deoxy. In some embodiments, each residue of the sense strand and antisense strand is independently modified with 2′-O-methyl nucleotide, 2′-deoxy nucleotide, 2′-deoxy-2′-fluoro nucleotide, 2′-O—N-methylacetamido (2′-O-NMA) nucleotide, a 2′-O-dimethylaminoethoxyethyl (2′-O-DMAEOE) nucleotide, 2′-O-aminopropyl (2′-O-AP) nucleotide, or 2′-ara-F nucleotide. Again, it is to be understood that these modifications are in addition to the at least one thermally destabilizing modification of the duplex present in the antisense strand.

[2591] In some embodiments, the dsRNA molecule of the disclosure comprises modifications of an alternating pattern, particular in the B1, B2, B3, B1′, B2′, B3′, B4′ regions. The term “alternating motif” or “alternative pattern” as used herein refers to a motif having one or more modifications, each modification occurring on alternating nucleotides of one strand. The alternating nucleotide may refer to one per every other nucleotide or one per every three nucleotides, or a similar pattern. For example, if A, B and C each represent one type of modification to the nucleotide, the alternating motif can be “ABABABABABAB . . . ,” “AABBAABBAABB . . . ,” “AABAABAABAAB . . . ,” “AAABAAABAAAB . . . ,” “AAABBBAAABBB . . . ,” or “ABCABCABCABC . . . ,” etc.

[2592] The type of modifications contained in the alternating motif may be the same or different. For example, if A, B, C, D each represent one type of modification on the nucleotide, the alternating pattern, i.e., modifications on every other nucleotide, may be the same, but each of the sense strand or antisense strand can be selected from several possibilities of modifications within the alternating motif such as “ABABAB . . . ”, “ACACAC . . . ” “BDBDBD . . . ” or “CDCDCD . . . ,” etc.

[2593] In some embodiments, the dsRNA molecule of the disclosure comprises the modification pattern for the alternating motif on the sense strand relative to the modification pattern for the alternating motif on the antisense strand is shifted. The shift may be such that the modified group of nucleotides of the sense strand corresponds to a differently modified group of nucleotides of the antisense strand and vice versa. For example, the sense strand when paired with the antisense strand in the dsRNA duplex, the alternating motif in the sense strand may start with “ABABAB” from 5′-3′ of the strand and the alternating motif in the antisense strand may start with “BABABA” from 3′-5′ of the strand within the duplex region. As another example, the alternating motif in the sense strand may start with “AABBAABB” from 5′-3′ of the strand and the alternating motif in the antisense strand may start with “BBAABBAA” from 3′-5′ of the strand within the duplex region, so that there is a complete or partial shift of the modification patterns between the sense strand and the antisense strand.

[2594] The dsRNA molecule of the disclosure may further comprise at least one phosphorothioate or methylphosphonate internucleotide linkage. The phosphorothioate or methylphosphonate internucleotide linkage modification may occur on any nucleotide of the sense strand or antisense strand or both in any position of the strand. For instance, the internucleotide linkage modification may occur on every nucleotide on the sense strand or antisense strand; each internucleotide linkage modification may occur in an alternating pattern on the sense strand or antisense strand; or the sense strand or antisense strand comprises both internucleotide linkage modifications in an alternating pattern. The alternating pattern of the internucleotide linkage modification on the sense strand may be the same or different from the antisense strand, and the alternating pattern of the internucleotide linkage modification on the sense strand may have a shift relative to the alternating pattern of the internucleotide linkage modification on the antisense strand.

[2595] In some embodiments, the dsRNA molecule comprises the phosphorothioate or methylphosphonate internucleotide linkage modification in the overhang region. For example, the overhang region comprises two nucleotides having a phosphorothioate or methylphosphonate internucleotide linkage between the two nucleotides. Internucleotide linkage modifications also may be made to link the overhang nucleotides with the terminal paired nucleotides within duplex region. For example, at least 2, 3, 4, or all the overhang nucleotides may be linked through phosphorothioate or methylphosphonate internucleotide linkage, and optionally, there may be additional phosphorothioate or methylphosphonate internucleotide linkages linking the overhang nucleotide with a paired nucleotide that is next to the overhang nucleotide. For instance, there may be at least two phosphorothioate internucleotide linkages between the terminal three nucleotides, in which two of the three nucleotides are overhang nucleotides, and the third is a paired nucleotide next to the overhang nucleotide. Preferably, these terminal three nucleotides may be at the 3′-end of the antisense strand.

[2596] In some embodiments, the sense strand of the dsRNA molecule comprises 1-10 blocks of two to ten phosphorothioate or methylphosphonate internucleotide linkages separated by 1, 2, 3, 4, 5, 6, 7, 8, 9, 10, 11, 12, 13, 14, 15, or 16 phosphate internucleotide linkages, wherein one of the phosphorothioate or methylphosphonate internucleotide linkages is placed at any position in the oligonucleotide sequence and the said sense strand is paired with an antisense strand comprising any combination of phosphorothioate, methylphosphonate and phosphate internucleotide linkages or an antisense strand comprising either phosphorothioate or methylphosphonate or phosphate linkage.

[2597] In some embodiments, the antisense strand of the dsRNA molecule comprises two blocks of two phosphorothioate or methylphosphonate internucleotide linkages separated by 1, 2, 3, 4, 5, 6, 7, 8, 9, 10, 11, 12, 13, 14, 15, 16, 17, or 18 phosphate internucleotide linkages, wherein one of the phosphorothioate or methylphosphonate internucleotide linkages is placed at any position in the oligonucleotide sequence and the said antisense strand is paired with a sense strand comprising any combination of phosphorothioate, methylphosphonate and phosphate internucleotide linkages or an antisense strand comprising either phosphorothioate or methylphosphonate or phosphate linkage.

[2598] In some embodiments, the antisense strand of the dsRNA molecule comprises two blocks of three phosphorothioate or methylphosphonate internucleotide linkages separated by 1, 2, 3, 4, 5, 6, 7, 8, 9, 10, 11, 12, 13, 14, 15, or 16 phosphate internucleotide linkages, wherein one of the phosphorothioate or methylphosphonate internucleotide linkages is placed at any position in the oligonucleotide sequence and the said antisense strand is paired with a sense strand comprising any combination of phosphorothioate, methylphosphonate and phosphate internucleotide linkages or an antisense strand comprising either phosphorothioate or methylphosphonate or phosphate linkage.

[2599] In some embodiments, the antisense strand of the dsRNA molecule comprises two blocks of four phosphorothioate or methylphosphonate internucleotide linkages separated by 1, 2, 3, 4, 5, 6, 7, 8, 9, 10, 11, 12, 13, or 14 phosphate internucleotide linkages, wherein one of the phosphorothioate or methylphosphonate internucleotide linkages is placed at any position in the oligonucleotide sequence and the said antisense strand is paired with a sense strand comprising any combination of phosphorothioate, methylphosphonate and phosphate internucleotide linkages or an antisense strand comprising either phosphorothioate or methylphosphonate or phosphate linkage.

[2600] In some embodiments, the antisense strand of the dsRNA molecule comprises two blocks of five phosphorothioate or methylphosphonate internucleotide linkages separated by 1, 2, 3, 4, 5, 6, 7, 8, 9, 10, 11, or 12 phosphate internucleotide linkages, wherein one of the phosphorothioate or methylphosphonate internucleotide linkages is placed at any position in the oligonucleotide sequence and the said antisense strand is paired with a sense strand comprising any combination of phosphorothioate, methylphosphonate and phosphate internucleotide linkages or an antisense strand comprising either phosphorothioate or methylphosphonate or phosphate linkage.

[2601] In some embodiments, the antisense strand of the dsRNA molecule comprises two blocks of six phosphorothioate or methylphosphonate internucleotide linkages separated by 1, 2, 3, 4, 5, 6, 7, 8, 9, or 10 phosphate internucleotide linkages, wherein one of the phosphorothioate or methylphosphonate internucleotide linkages is placed at any position in the oligonucleotide sequence and the said antisense strand is paired with a sense strand comprising any combination of phosphorothioate, methylphosphonate and phosphate internucleotide linkages or an antisense strand comprising either phosphorothioate or methylphosphonate or phosphate linkage.

[2602] In some embodiments, the antisense strand of the dsRNA molecule comprises two blocks of seven phosphorothioate or methylphosphonate internucleotide linkages separated by 1, 2, 3, 4, 5, 6, 7, or 8 phosphate internucleotide linkages, wherein one of the phosphorothioate or methylphosphonate internucleotide linkages is placed at any position in the oligonucleotide sequence and the said antisense strand is paired with a sense strand comprising any combination of phosphorothioate, methylphosphonate and phosphate internucleotide linkages or an antisense strand comprising either phosphorothioate or methylphosphonate or phosphate linkage.

[2603] In some embodiments, the antisense strand of the dsRNA molecule comprises two blocks of eight phosphorothioate or methylphosphonate internucleotide linkages separated by 1, 2, 3, 4, 5, or 6 phosphate internucleotide linkages, wherein one of the phosphorothioate or methylphosphonate internucleotide linkages is placed at any position in the oligonucleotide sequence and the said antisense strand is paired with a sense strand comprising any combination of phosphorothioate, methylphosphonate and phosphate internucleotide linkages or an antisense strand comprising either phosphorothioate or methylphosphonate or phosphate linkage.

[2604] In some embodiments, the antisense strand of the dsRNA molecule comprises two blocks of nine phosphorothioate or methylphosphonate internucleotide linkages separated by 1, 2, 3, or 4 phosphate internucleotide linkages, wherein one of the phosphorothioate or methylphosphonate internucleotide linkages is placed at any position in the oligonucleotide sequence and the said antisense strand is paired with a sense strand comprising any combination of phosphorothioate, methylphosphonate and phosphate internucleotide linkages or an antisense strand comprising either phosphorothioate or methylphosphonate or phosphate linkage.

[2605] In some embodiments, the dsRNA molecule of the disclosure further comprises one or more phosphorothioate or methylphosphonate internucleotide linkage modification within 1-10 of the termini position(s) of the sense or antisense strand. For example, at least 2, 3, 4, 5, 6, 7, 8, 9, or 10 nucleotides may be linked through phosphorothioate or methylphosphonate internucleotide linkage at one end or both ends of the sense or antisense strand.

[2606] In some embodiments, the dsRNA molecule of the disclosure further comprises one or more phosphorothioate or methylphosphonate internucleotide linkage modification within 1-10 of the internal region of the duplex of each of the sense or antisense strand. For example, at least 2, 3, 4, 5, 6, 7, 8, 9, or 10 nucleotides may be linked through phosphorothioate methylphosphonate internucleotide linkage at position 8-16 of the duplex region counting from the 5′-end of the sense strand; the dsRNA molecule can optionally further comprise one or more phosphorothioate or methylphosphonate internucleotide linkage modification within 1-10 of the termini position(s).

[2607] In some embodiments, the dsRNA molecule of the disclosure further comprises one to five phosphorothioate or methylphosphonate internucleotide linkage modification(s) within position 1-5 and one to five phosphorothioate or methylphosphonate internucleotide linkage modification(s) within position 18-23 of the sense strand (counting from the 5′-end), and one to five phosphorothioate or methylphosphonate internucleotide linkage modification at positions 1 and 2 and one to five within positions 18-23 of the antisense strand (counting from the 5′-end).

[2608] In some embodiments, the dsRNA molecule of the disclosure further comprises one phosphorothioate internucleotide linkage modification within position 1-5 and one phosphorothioate or methylphosphonate internucleotide linkage modification within position 18-23 of the sense strand (counting from the 5′-end), and one phosphorothioate internucleotide linkage modification at positions 1 and 2 and two phosphorothioate or methylphosphonate internucleotide linkage modifications within positions 18-23 of the antisense strand (counting from the 5′-end).

[2609] In some embodiments, the dsRNA molecule of the disclosure further comprises two phosphorothioate internucleotide linkage modifications within position 1-5 and one phosphorothioate internucleotide linkage modification within position 18-23 of the sense strand (counting from the 5′-end), and one phosphorothioate internucleotide linkage modification at positions 1 and 2 and two phosphorothioate internucleotide linkage modifications within positions 18-23 of the antisense strand (counting from the 5′-end).

[2610] In some embodiments, the dsRNA molecule of the disclosure further comprises two phosphorothioate internucleotide linkage modifications within position 1-5 and two phosphorothioate internucleotide linkage modifications within position 18-23 of the sense strand (counting from the 5′-end), and one phosphorothioate internucleotide linkage modification at positions 1 and 2 and two phosphorothioate internucleotide linkage modifications within positions 18-23 of the antisense strand (counting from the 5′-end).

[2611] In some embodiments, the dsRNA molecule of the disclosure further comprises two phosphorothioate internucleotide linkage modifications within position 1-5 and two phosphorothioate internucleotide linkage modifications within position 18-23 of the sense strand (counting from the 5′-end), and one phosphorothioate internucleotide linkage modification at positions 1 and 2 and one phosphorothioate internucleotide linkage modification within positions 18-23 of the antisense strand (counting from the 5′-end).

[2612] In some embodiments, the dsRNA molecule of the disclosure further comprises one phosphorothioate internucleotide linkage modification within position 1-5 and one phosphorothioate internucleotide linkage modification within position 18-23 of the sense strand (counting from the 5′-end), and two phosphorothioate internucleotide linkage modifications at positions 1 and 2 and two phosphorothioate internucleotide linkage modifications within positions 18-23 of the antisense strand (counting from the 5′-end).

[2613] In some embodiments, the dsRNA molecule of the disclosure further comprises one phosphorothioate internucleotide linkage modification within position 1-5 and one within position 18-23 of the sense strand (counting from the 5′-end), and two phosphorothioate internucleotide linkage modification at positions 1 and 2 and one phosphorothioate internucleotide linkage modification within positions 18-23 of the antisense strand (counting from the 5′-end).

[2614] In some embodiments, the dsRNA molecule of the disclosure further comprises one phosphorothioate internucleotide linkage modification within position 1-5 (counting from the 5′-end) of the sense strand, and two phosphorothioate internucleotide linkage modifications at positions 1 and 2 and one phosphorothioate internucleotide linkage modification within positions 18-23 of the antisense strand (counting from the 5′-end).

[2615] In some embodiments, the dsRNA molecule of the disclosure further comprises two phosphorothioate internucleotide linkage modifications within position 1-5 (counting from the 5′-end) of the sense strand, and one phosphorothioate internucleotide linkage modification at positions 1 and 2 and two phosphorothioate internucleotide linkage modifications within positions 18-23 of the antisense strand (counting from the 5′-end).

[2616] In some embodiments, the dsRNA molecule of the disclosure further comprises two phosphorothioate internucleotide linkage modifications within position 1-5 and one within position 18-23 of the sense strand (counting from the 5′-end), and two phosphorothioate internucleotide linkage modifications at positions 1 and 2 and one phosphorothioate internucleotide linkage modification within positions 18-23 of the antisense strand (counting from the 5′-end).

[2617] In some embodiments, the dsRNA molecule of the disclosure further comprises two phosphorothioate internucleotide linkage modifications within position 1-5 and one phosphorothioate internucleotide linkage modification within position 18-23 of the sense strand (counting from the 5′-end), and two phosphorothioate internucleotide linkage modifications at positions 1 and 2 and two phosphorothioate internucleotide linkage modifications within positions 18-23 of the antisense strand (counting from the 5′-end).

[2618] In some embodiments, the dsRNA molecule of the disclosure further comprises two phosphorothioate internucleotide linkage modifications within position 1-5 and one phosphorothioate internucleotide linkage modification within position 18-23 of the sense strand (counting from the 5′-end), and one phosphorothioate internucleotide linkage modification at positions 1 and 2 and two phosphorothioate internucleotide linkage modifications within positions 18-23 of the antisense strand (counting from the 5′-end).

[2619] In some embodiments, the dsRNA molecule of the disclosure further comprises two phosphorothioate internucleotide linkage modifications at position 1 and 2, and two phosphorothioate internucleotide linkage modifications at position 20 and 21 of the sense strand (counting from the 5′-end), and one phosphorothioate internucleotide linkage modification at positions 1 and one at position 21 of the antisense strand (counting from the 5′-end).

[2620] In some embodiments, the dsRNA molecule of the disclosure further comprises one phosphorothioate internucleotide linkage modification at position 1, and one phosphorothioate internucleotide linkage modification at position 21 of the sense strand (counting from the 5′-end), and two phosphorothioate internucleotide linkage modifications at positions 1 and 2 and two phosphorothioate internucleotide linkage modifications at positions 20 and 21 the antisense strand (counting from the 5′-end).

[2621] In some embodiments, the dsRNA molecule of the disclosure further comprises two phosphorothioate internucleotide linkage modifications at position 1 and 2, and two phosphorothioate internucleotide linkage modifications at position 21 and 22 of the sense strand (counting from the 5′-end), and one phosphorothioate internucleotide linkage modification at positions 1 and one phosphorothioate internucleotide linkage modification at position 21 of the antisense strand (counting from the 5′-end).

[2622] In some embodiments, the dsRNA molecule of the disclosure further comprises one phosphorothioate internucleotide linkage modification at position 1, and one phosphorothioate internucleotide linkage modification at position 21 of the sense strand (counting from the 5′-end), and two phosphorothioate internucleotide linkage modifications at positions 1 and 2 and two phosphorothioate internucleotide linkage modifications at positions 21 and 22 the antisense strand (counting from the 5′-end).

[2623] In some embodiments, the dsRNA molecule of the disclosure further comprises two phosphorothioate internucleotide linkage modifications at position 1 and 2, and two phosphorothioate internucleotide linkage modifications at position 22 and 23 of the sense strand (counting from the 5′-end), and one phosphorothioate internucleotide linkage modification at positions 1 and one phosphorothioate internucleotide linkage modification at position 21 of the antisense strand (counting from the 5′-end).

[2624] In some embodiments, the dsRNA molecule of the disclosure further comprises one phosphorothioate internucleotide linkage modification at position 1, and one phosphorothioate internucleotide linkage modification at position 21 of the sense strand (counting from the 5′-end), and two phosphorothioate internucleotide linkage modifications at positions 1 and 2 and two phosphorothioate internucleotide linkage modifications at positions 23 and 23 the antisense strand (counting from the 5′-end).

[2625] In some embodiments, compound of the disclosure comprises a pattern of backbone chiral centers. In some embodiments, a common pattern of backbone chiral centers comprises at least 5 internucleotidic linkages in the Sp configuration. In some embodiments, a common pattern of backbone chiral centers comprises at least 6 internucleotidic linkages in the Sp configuration. In some embodiments, a common pattern of backbone chiral centers comprises at least 7 internucleotidic linkages in the Sp configuration. In some embodiments, a common pattern of backbone chiral centers comprises at least 8 internucleotidic linkages in the Sp configuration. In some embodiments, a common pattern of backbone chiral centers comprises at least 9 internucleotidic linkages in the Sp configuration. In some embodiments, a common pattern of backbone chiral centers comprises at least 10 internucleotidic linkages in the Sp configuration. In some embodiments, a common pattern of backbone chiral centers comprises at least 11 internucleotidic linkages in the Sp configuration. In some embodiments, a common pattern of backbone chiral centers comprises at least 12 internucleotidic linkages in the Sp configuration. In some embodiments, a common pattern of backbone chiral centers comprises at least 13 internucleotidic linkages in the Sp configuration. In some embodiments, a common pattern of backbone chiral centers comprises at least 14 internucleotidic linkages in the Sp configuration. In some embodiments, a common pattern of backbone chiral centers comprises at least 15 internucleotidic linkages in the Sp configuration. In some embodiments, a common pattern of backbone chiral centers comprises at least 16 internucleotidic linkages in the Sp configuration. In some embodiments, a common pattern of backbone chiral centers comprises at least 17 internucleotidic linkages in the Sp configuration. In some embodiments, a common pattern of backbone chiral centers comprises at least 18 internucleotidic linkages in the Sp configuration. In some embodiments, a common pattern of backbone chiral centers comprises at least 19 internucleotidic linkages in the Sp configuration. In some embodiments, a common pattern of backbone chiral centers comprises no more than 8 internucleotidic linkages in the Rp configuration. In some embodiments, a common pattern of backbone chiral centers comprises no more than 7 internucleotidic linkages in the Rp configuration. In some embodiments, a common pattern of backbone chiral centers comprises no more than 6 internucleotidic linkages in the Rp configuration. In some embodiments, a common pattern of backbone chiral centers comprises no more than 5 internucleotidic linkages in the Rp configuration. In some embodiments, a common pattern of backbone chiral centers comprises no more than 4 internucleotidic linkages in the Rp configuration. In some embodiments, a common pattern of backbone chiral centers comprises no more than 3 internucleotidic linkages in the Rp configuration. In some embodiments, a common pattern of backbone chiral centers comprises no more than 2 internucleotidic linkages in the Rp configuration. In some embodiments, a common pattern of backbone chiral centers comprises no more than 1 internucleotidic linkages in the Rp configuration. In some embodiments, a common pattern of backbone chiral centers comprises no more than 8 internucleotidic linkages which are not chiral (as a non-limiting example, a phosphodiester). In some embodiments, a common pattern of backbone chiral centers comprises no more than 7 internucleotidic linkages which are not chiral. In some embodiments, a common pattern of backbone chiral centers comprises no more than 6 internucleotidic linkages which are not chiral. In some embodiments, a common pattern of backbone chiral centers comprises no more than 5 internucleotidic linkages which are not chiral. In some embodiments, a common pattern of backbone chiral centers comprises no more than 4 internucleotidic linkages which are not chiral. In some embodiments, a common pattern of backbone chiral centers comprises no more than 3 internucleotidic linkages which are not chiral. In some embodiments, a common pattern of backbone chiral centers comprises no more than 2 internucleotidic linkages which are not chiral. In some embodiments, a common pattern of backbone chiral centers comprises no more than 1 internucleotidic linkages which are not chiral. In some embodiments, a common pattern of backbone chiral centers comprises at least 10 internucleotidic linkages in the Sp configuration, and no more than 8 internucleotidic linkages which are not chiral. In some embodiments, a common pattern of backbone chiral centers comprises at least 11 internucleotidic linkages in the Sp configuration, and no more than 7 internucleotidic linkages which are not chiral. In some embodiments, a common pattern of backbone chiral centers comprises at least 12 internucleotidic linkages in the Sp configuration, and no more than 6 internucleotidic linkages which are not chiral. In some embodiments, a common pattern of backbone chiral centers comprises at least 13 internucleotidic linkages in the Sp configuration, and no more than 6 internucleotidic linkages which are not chiral. In some embodiments, a common pattern of backbone chiral centers comprises at least 14 internucleotidic linkages in the Sp configuration, and no more than 5 internucleotidic linkages which are not chiral. In some embodiments, a common pattern of backbone chiral centers comprises at least 15 internucleotidic linkages in the Sp configuration, and no more than 4 internucleotidic linkages which are not chiral. In some embodiments, the internucleotidic linkages in the Sp configuration are optionally contiguous or not contiguous. In some embodiments, the internucleotidic linkages in the Rp configuration are optionally contiguous or not contiguous. In some embodiments, the internucleotidic linkages which are not chiral are optionally contiguous or not contiguous.

[2626] In some embodiments, compound of the disclosure comprises a block is a stereochemistry block. In some embodiments, a block is an Rp block in that each internucleotidic linkage of the block is Rp. In some embodiments, a 5′-block is an Rp block. In some embodiments, a 3′-block is an Rp block. In some embodiments, a block is an Sp block in that each internucleotidic linkage of the block is Sp. In some embodiments, a 5′-block is an Sp block. In some embodiments, a 3′-block is an Sp block. In some embodiments, provided oligonucleotides comprise both Rp and Sp blocks. In some embodiments, provided oligonucleotides comprise one or more Rp but no Sp blocks. In some embodiments, provided oligonucleotides comprise one or more Sp but no Rp blocks. In some embodiments, provided oligonucleotides comprise one or more PO blocks wherein each internucleotidic linkage in a natural phosphate linkage.

[2627] In some embodiments, compound of the disclosure comprises a 5′-block is an Sp block wherein each sugar moiety comprises a 2′-F modification. In some embodiments, a 5′-block is an Sp block wherein each of internucleotidic linkage is a modified internucleotidic linkage and each sugar moiety comprises a 2′-F modification. In some embodiments, a 5′-block is an Sp block wherein each of internucleotidic linkage is a phosphorothioate linkage and each sugar moiety comprises a 2′-F modification. In some embodiments, a 5′-block comprises 4 or more nucleoside units. In some embodiments, a 5′-block comprises 5 or more nucleoside units. In some embodiments, a 5′-block comprises 6 or more nucleoside units. In some embodiments, a 5′-block comprises 7 or more nucleoside units. In some embodiments, a 3′-block is an Sp block wherein each sugar moiety comprises a 2′-F modification. In some embodiments, a 3′-block is an Sp block wherein each of internucleotidic linkage is a modified internucleotidic linkage and each sugar moiety comprises a 2′-F modification. In some embodiments, a 3′-block is an Sp block wherein each of internucleotidic linkage is a phosphorothioate linkage and each sugar moiety comprises a 2′-F modification. In some embodiments, a 3′-block comprises 4 or more nucleoside units. In some embodiments, a 3′-block comprises 5 or more nucleoside units. In some embodiments, a 3′-block comprises 6 or more nucleoside units. In some embodiments, a 3′-block comprises 7 or more nucleoside units.

[2628] In some embodiments, compound of the disclosure comprises a type of nucleoside in a region or an oligonucleotide is followed by a specific type of internucleotidic linkage, e.g., natural phosphate linkage, modified internucleotidic linkage, Rp chiral internucleotidic linkage, Sp chiral internucleotidic linkage, etc. In some embodiments, A is followed by Sp. In some embodiments, A is followed by Rp. In some embodiments, A is followed by natural phosphate linkage (PO). In some embodiments, U is followed by Sp. In some embodiments, U is followed by Rp. In some embodiments, U is followed by natural phosphate linkage (PO). In some embodiments, C is followed by Sp. In some embodiments, C is followed by Rp. In some embodiments, C is followed by natural phosphate linkage (PO). In some embodiments, G is followed by Sp. In some embodiments, G is followed by Rp. In some embodiments, G is followed by natural phosphate linkage (PO). In some embodiments, C and U are followed by Sp. In some embodiments, C and U are followed by Rp. In some embodiments, C and U are followed by natural phosphate linkage (PO). In some embodiments, A and G are followed by Sp. In some embodiments, A and G are followed by Rp.

[2629] In some embodiments, the antisense strand comprises phosphorothioate internucleotide linkages between nucleotide positions 21 and 22, and between nucleotide positions 22 and 23, wherein the antisense strand contains at least one thermally destabilizing modification of the duplex located in the seed region of the antisense strand (i.e., at position 2-9 of the 5′-end of the antisense strand), and wherein the dsRNA optionally further has at least one (e.g., one, two, three, four, five, six, seven or all eight) of the following characteristics: (i) the antisense comprises 2, 3, 4, 5 or 6 2′-fluoro modifications; (ii) the antisense comprises 3, 4 or 5 phosphorothioate internucleotide linkages; (iii) the sense strand is conjugated with a ligand; (iv) the sense strand comprises 2, 3, 4 or 5 2′-fluoro modifications; (v) the sense strand comprises 1, 2, 3, 4 or 5 phosphorothioate internucleotide linkages; (vi) the dsRNA comprises at least four 2′-fluoro modifications; (vii) the dsRNA comprises a duplex region of 12-40 nucleotide pairs in length; and (viii) the dsRNA has a blunt end at 5′-end of the antisense strand.

[2630] In some embodiments, the antisense strand comprises phosphorothioate internucleotide linkages between nucleotide positions 1 and 2, between nucleotide positions 2 and 3, between nucleotide positions 21 and 22, and between nucleotide positions 22 and 23, wherein the antisense strand contains at least one thermally destabilizing modification of the duplex located in the seed region of the antisense strand (i.e., at position 2-9 of the 5′-end of the antisense strand), and wherein the dsRNA optionally further has at least one (e.g., one, two, three, four, five, six, seven or all eight) of the following characteristics: (i) the antisense comprises 2, 3, 4, 5 or 6 2′-fluoro modifications; (ii) the sense strand is conjugated with a ligand; (iii) the sense strand comprises 2, 3, 4 or 5 2′-fluoro modifications; (iv) the sense strand comprises 1, 2, 3, 4 or 5 phosphorothioate internucleotide linkages; (v) the dsRNA comprises at least four 2′-fluoro modifications; (vi) the dsRNA comprises a duplex region of 12-40 nucleotide pairs in length; (vii) the dsRNA comprises a duplex region of 12-40 nucleotide pairs in length; and (viii) the dsRNA has a blunt end at 5′-end of the antisense strand.

[2631] In some embodiments, the sense strand comprises phosphorothioate internucleotide linkages between nucleotide positions 1 and 2, and between nucleotide positions 2 and 3, wherein the antisense strand contains at least one thermally destabilizing modification of the duplex located in the seed region of the antisense strand (i.e., at position 2-9 of the 5′-end of the antisense strand), and wherein the dsRNA optionally further has at least one (e.g., one, two, three, four, five, six, seven or all eight) of the following characteristics: (i) the antisense comprises 2, 3, 4, 5 or 6 2′-fluoro modifications; (ii) the antisense comprises 1, 2, 3, 4 or 5 phosphorothioate internucleotide linkages; (iii) the sense strand is conjugated with a ligand; (iv) the sense strand comprises 2, 3, 4 or 5 2′-fluoro modifications; (v) the sense strand comprises 3, 4 or 5 phosphorothioate internucleotide linkages; (vi) the dsRNA comprises at least four 2′-fluoro modifications; (vii) the dsRNA comprises a duplex region of 12-40 nucleotide pairs in length; and (viii) the dsRNA has a blunt end at 5′-end of the antisense strand.

[2632] In some embodiments, the sense strand comprises phosphorothioate internucleotide linkages between nucleotide positions 1 and 2, and between nucleotide positions 2 and 3, the antisense strand comprises phosphorothioate internucleotide linkages between nucleotide positions 1 and 2, between nucleotide positions 2 and 3, between nucleotide positions 21 and 22, and between nucleotide positions 22 and 23, wherein the antisense strand contains at least one thermally destabilizing modification of the duplex located in the seed region of the antisense strand (i.e., at position 2-9 of the 5′-end of the antisense strand), and wherein the dsRNA optionally further has at least one (e.g., one, two, three, four, five, six or all seven) of the following characteristics: (i) the antisense comprises 2, 3, 4, 5 or 6 2′-fluoro modifications; (ii) the sense strand is conjugated with a ligand; (iii) the sense strand comprises 2, 3, 4 or 5 2′-fluoro modifications; (iv) the sense strand comprises 3, 4 or 5 phosphorothioate internucleotide linkages; (v) the dsRNA comprises at least four 2′-fluoro modifications; (vi) the dsRNA comprises a duplex region of 12-40 nucleotide pairs in length; and (vii) the dsRNA has a blunt end at 5′-end of the antisense strand.

[2633] In some embodiments, the dsRNA molecule of the disclosure comprises mismatch(es) with the target, within the duplex, or combinations thereof. The mismatch can occur in the overhang region or the duplex region. The base pair can be ranked on the basis of their propensity to promote dissociation or melting (e.g., on the free energy of association or dissociation of a particular pairing, the simplest approach is to examine the pairs on an individual pair basis, though next neighbor or similar analysis can also be used). In terms of promoting dissociation: A:U is preferred over G:C; G:U is preferred over G:C; and I:C is preferred over G:C (I=inosine). Mismatches, e.g., non-canonical or other than canonical pairings (as described elsewhere herein) are preferred over canonical (A:T, A:U, G:C) pairings; and pairings which include a universal base are preferred over canonical pairings.

[2634] In some embodiments, the dsRNA molecule of the disclosure comprises at least one of the first 1, 2, 3, 4, or 5 base pairs within the duplex regions from the 5′-end of the antisense strand can be chosen independently from the group of: A:U, G:U, I:C, and mismatched pairs, e.g., non-canonical or other than canonical pairings or pairings which include a universal base, to promote the dissociation of the antisense strand at the 5′-end of the duplex.

[2635] In some embodiments, the nucleotide at the 1 position within the duplex region from the 5′-end in the antisense strand is selected from the group consisting of A, dA, dU, U, and dT.

[2636] Alternatively, at least one of the first 1, 2 or 3 base pair within the duplex region from the 5′-end of the antisense strand is an AU base pair. For example, the first base pair within the duplex region from the 5′-end of the antisense strand is an AU base pair.

[2637] It was found that introducing 4′-modified or 5′-modified nucleotide to the 3′-end of a phosphodiester (PO), phosphorothioate (PS), or phosphorodithioate (PS2) linkage of a dinucleotide at any position of single stranded or double stranded oligonucleotide can exert steric effect to the internucleotide linkage and, hence, protecting or stabilizing it against nucleases.

[2638] In some embodiments, 5′-modified nucleoside is introduced at the 3′-end of a dinucleotide at any position of single stranded or double stranded siRNA. For instance, a 5′-alkylated nucleoside may be introduced at the 3′-end of a dinucleotide at any position of single stranded or double stranded siRNA. The alkyl group at the 5′ position of the ribose sugar can be racemic or chirally pure R or S isomer. An exemplary 5′-alkylated nucleoside is 5′-methyl nucleoside. The 5′-methyl can be either racemic or chirally pure R or S isomer.

[2639] In some embodiments, 4′-modified nucleoside is introduced at the 3′-end of a dinucleotide at any position of single stranded or double stranded siRNA. For instance, a 4′-alkylated nucleoside may be introduced at the 3′-end of a dinucleotide at any position of single stranded or double stranded siRNA. The alkyl group at the 4′ position of the ribose sugar can be racemic or chirally pure R or S isomer. An exemplary 4′-alkylated nucleoside is 4′-methyl nucleoside. The 4′-methyl can be either racemic or chirally pure R or S isomer. Alternatively, a 4′-O-alkylated nucleoside may be introduced at the 3′-end of a dinucleotide at any position of single stranded or double stranded siRNA. The 4′-O-alkyl of the ribose sugar can be racemic or chirally pure R or S isomer. An exemplary 4′-O-alkylated nucleoside is 4′-O-methyl nucleoside. The 4′-O-methyl can be either racemic or chirally pure R or S isomer.

[2640] In some embodiments, 5′-alkylated nucleoside is introduced at any position on the sense strand or antisense strand of a dsRNA, and such modification maintains or improves potency of the dsRNA. The 5′-alkyl can be either racemic or chirally pure R or S isomer. An exemplary 5′-alkylated nucleoside is 5′-methyl nucleoside. The 5′-methyl can be either racemic or chirally pure R or S isomer.

[2641] In some embodiments, 4′-alkylated nucleoside is introduced at any position on the sense strand or antisense strand of a dsRNA, and such modification maintains or improves potency of the dsRNA. The 4′-alkyl can be either racemic or chirally pure R or S isomer. An exemplary 4′-alkylated nucleoside is 4′-methyl nucleoside. The 4′-methyl can be either racemic or chirally pure R or S isomer.

[2642] In some embodiments, 4′-O-alkylated nucleoside is introduced at any position on the sense strand or antisense strand of a dsRNA, and such modification maintains or improves potency of the dsRNA. The 5′-alkyl can be either racemic or chirally pure R or S isomer. An exemplary 4′-O-alkylated nucleoside is 4′-O-methyl nucleoside. The 4′-O-methyl can be either racemic or chirally pure R or S isomer.

[2643] In some embodiments, the dsRNA molecule of the disclosure can comprise 2′-5′ linkages (with 2′-H, 2′-OH and 2′-OMe and with P═O or P═S). For example, the 2′-5′ linkages modifications can be used to promote nuclease resistance or to inhibit binding of the sense to the antisense strand, or can be used at the 5′ end of the sense strand to avoid sense strand activation by RISC.

[2644] In another embodiment, the dsRNA molecule of the disclosure can comprise L sugars (e.g., L ribose, L-arabinose with 2′-H, 2′-OH and 2′-OMe). For example, these L sugars modifications can be used to promote nuclease resistance or to inhibit binding of the sense to the antisense strand, or can be used at the 5′ end of the sense strand to avoid sense strand activation by RISC.

[2645] Various publications describe multimeric siRNA which can all be used with the dsRNA of the disclosure. Such publications include WO2007/091269, U.S. Pat. No. 7,858,769, WO2010/141511, WO2007/117686, WO2009/014887, and WO2011/031520 which are hereby incorporated by their entirely.

[2646] As described in more detail below, the RNAi agent that contains conjugations of one or more carbohydrate moieties to an RNAi agent may improve one or more properties of the RNAi agent. In many cases, the carbohydrate moiety will be attached to a modified subunit of the RNAi agent. For example, the ribose sugar of one or more ribonucleotide subunits of a dsRNA agent can be replaced with another moiety, e.g., a non-carbohydrate (preferably cyclic) carrier to which is attached a carbohydrate ligand. A ribonucleotide subunit in which the ribose sugar of the subunit has been so replaced is referred to herein as a ribose replacement modification subunit (RRMS). A cyclic carrier may be a carbocyclic ring system, i.e., all ring atoms are carbon atoms, or a heterocyclic ring system, i.e., one or more ring atoms may be a heteroatom, e.g., nitrogen, oxygen, sulfur. The cyclic carrier may be a monocyclic ring system, or may contain two or more rings, e.g. fused rings. The cyclic carrier may be a fully saturated ring system, or it may contain one or more double bonds.

[2647] The ligand may be attached to the polynucleotide via a carrier. The carriers include (i) at least one “backbone attachment point,” preferably two “backbone attachment points” and (ii) at least one “tethering attachment point.” A “backbone attachment point” as used herein refers to a functional group, e.g. a hydroxyl group, or generally, a bond available for, and that is suitable for incorporation of the carrier into the backbone, e.g., the phosphate, or modified phosphate, e.g., sulfur containing, backbone, of a ribonucleic acid. A “tethering attachment point” (TAP) in some embodiments refers to a constituent ring atom of the cyclic carrier, e.g., a carbon atom or a heteroatom (distinct from an atom which provides a backbone attachment point), that connects a selected moiety. The moiety can be, e.g., a carbohydrate, e.g. monosaccharide, disaccharide, trisaccharide, tetrasaccharide, oligosaccharide and polysaccharide. Optionally, the selected moiety is connected by an intervening tether to the cyclic carrier. Thus, the cyclic carrier will often include a functional group, e.g., an amino group, or generally, provide a bond, that is suitable for incorporation or tethering of another chemical entity, e.g., a ligand to the constituent ring.

[2648] The RNAi agents may be conjugated to a ligand via a carrier, wherein the carrier can be cyclic group or acyclic group. The cyclic group can be selected from pyrrolidinyl, pyrazolinyl, pyrazolidinyl, imidazolinyl, imidazolidinyl, piperidinyl, piperazinyl, [1,3]dioxolane, oxazolidinyl, isoxazolidinyl, morpholinyl, thiazolidinyl, isothiazolidinyl, quinoxalinyl, pyridazinonyl, tetrahydrofuryl and decalinyl. The acyclic group can be a serinol backbone or diethanolamine backbone.

### IV. Delivery of an RNAi Agent of the Disclosure

[2649] The delivery of a RNAi agent of the disclosure to a cell e.g., a skeletal muscle cell, e.g., a skeletal myocyte and/or a cardiomyocyte, e.g., a cell within a subject, such as a human subject (e.g., a subject in need thereof, such as a subject having a target gene-associated disorder, e.g., skeletal muscle and/or cardiac muscle disease or disorder or lung disease or disorder, can be achieved in a number of different ways. For example, delivery may be performed by contacting a cell with an RNAi agent of the disclosure either in vitro or in vivo. In vivo delivery may also be performed directly by administering a composition comprising an RNAi agent, e.g., a dsRNA, to a subject. Alternatively, in vivo delivery may be performed indirectly by administering one or more vectors that encode and direct the expression of the RNAi agent. These alternatives are discussed further below.

[2650] In general, any method of delivering a nucleic acid molecule (in vitro or in vivo) can be adapted for use with a RNAi agent of the disclosure (see e.g., Akhtar S. and Julian R L., (1992) Trends Cell. Biol. 2(5):139-144 and WO94/02595, which are incorporated herein by reference in their entireties). For in vivo delivery, factors to consider in order to deliver an RNAi agent include, for example, biological stability of the delivered agent, prevention of non-specific effects, and accumulation of the delivered agent in the target tissue. The non-specific effects of an RNAi agent can be minimized by local administration, for example, by direct injection or implantation into a tissue or topically administering the preparation. Local administration to a treatment site maximizes local concentration of the agent, limits the exposure of the agent to systemic tissues that can otherwise be harmed by the agent or that can degrade the agent, and permits a lower total dose of the RNAi agent to be administered. For administering a RNAi agent systemically for the treatment of a disease, the RNA can be modified or alternatively delivered using a drug delivery system; both methods act to prevent the rapid degradation of the dsRNA by endo- and exo-nucleases in vivo. Modification of the RNA or the pharmaceutical carrier can also permit targeting of the RNAi agent to the target tissue and avoid undesirable off-target effects (e.g., without wishing to be bound by theory, use of GNAs as described herein has been identified to destabilize the seed region of a dsRNA, resulting in enhanced preference of such dsRNAs for on-target effectiveness, relative to off-target effects, as such off-target effects are significantly weakened by such seed region destabilization). Conjugation of an RNAi agent to an aptamer has been shown to inhibit tumor growth and mediate tumor regression in a mouse model of prostate cancer (McNamara, J O. et al., (2006) Nat. Biotechnol. 24:1005-1015). In an alternative embodiment, the RNAi agent can be delivered using drug delivery systems such as a nanoparticle, a dendrimer, a polymer, liposomes, or a cationic delivery system. Positively charged cationic delivery systems facilitate binding of molecule RNAi agent (negatively charged) and also enhance interactions at the negatively charged cell membrane to permit efficient uptake of an RNAi agent by the cell. Cationic lipids, dendrimers, or polymers can either be bound to an RNAi agent, or induced to form a vesicle or micelle (see e.g., Kim S H. et al., (2008) Journal of Controlled Release 129(2):107-116) that encases an RNAi agent. The formation of vesicles or micelles further prevents degradation of the RNAi agent when administered systemically. Methods for making and administering cationic- RNAi agent complexes are well within the abilities of one skilled in the art (see e.g., Sorensen, D R., et al. (2003) J. Mol. Biol 327:761-766; Verma, U N. et al., (2003) Clin. Cancer Res. 9:1291-1300; Arnold, A S et al. (2007) J Hypertens. 25:197-205, which are incorporated herein by reference in their entirety). Some non-limiting examples of drug delivery systems useful for systemic delivery of RNAi agents include DOTAP (Sorensen, D R., et al (2003), supra; Verma, U N. et al., (2003), supra), Oligofectamine, “solid nucleic acid lipid particles” (Zimmermann, T S. et al., (2006) Nature 441:111-114), cardiolipin (Chien, P Y. et al., (2005) Cancer Gene Ther. 12:321-328; Pal, A. et al., (2005) Int J. Oncol. 26:1087-1091), polyethyleneimine (Bonnet M E. et al., (2008) Pharm. Res. August 16 Epub ahead of print; Aigner, A. (2006) J. Biomed. Biotechnol. 71659), Arg-Gly-Asp (RGD) peptides (Liu, S. (2006) Mol. Pharm. 3:472-487), and polyamidoamines (Tomalia, D A. et al., (2007) Biochem. Soc. Trans. 35:61-67; Yoo, H. et al., (1999) Pharm. Res. 16:1799-1804). In some embodiments, a RNAi agent forms a complex with cyclodextrin for systemic administration. Methods for administration and pharmaceutical compositions of RNAi agents and cyclodextrins can be found in U.S. Pat. No. 7,427,605, which is herein incorporated by reference in its entirety.

[2651] Certain aspects of the instant disclosure relate to a method of reducing the expression of a target gene in a skeletal muscle cell and/or a cardiac muscle cell, comprising contacting said cell with the double-stranded RNAi agent of the disclosure.

[2652] In certain embodiments, the RNAi agent is taken up on one or more tissue or cell types present in organs, e.g., skeletal muscle tissue and/or cardiac muscle tissue.

[2653] Certain aspects of the instant disclosure relate to a method of reducing the expression of a target gene in a lung cell, comprising contacting said cell with the double-stranded RNAi agent of the disclosure.

[2654] In certain embodiments, the RNAi agent is taken up on one or more tissue or cell types present in organs, e.g., lung tissue.

[2655] Another aspect of the disclosure relates to a method of reducing the expression and/or activity of a target gene in a subject, comprising administering to the subject the double-stranded RNAi agent of the disclosure.

[2656] Another aspect of the disclosure relates to a method of treating a subject having a target gene-associated disorder or at risk of having or at risk of developing a target gene-associated disorder, comprising administering to the subject a therapeutically effective amount of the double-stranded RNAi agent of the disclosure, thereby treating the subject.

[2657] In one embodiment, the double-stranded RNAi agent is administered subcutaneously.

[2658] In one embodiment, the double-stranded RNAi agent is administered intramuscularly.

[2659] In one embodiment, the double-stranded RNAi agent is administered by intravenously.

[2660] In one embodiment, the double-stranded RNAi agent is administered by pulmonary system administration, e.g., intranasal administration, or oral inhalative administration.

[2661] For ease of exposition the formulations, compositions and methods in this section are discussed largely with regard to modified siRNA compounds. It may be understood, however, that these formulations, compositions and methods can be practiced with other siRNA compounds, e.g., unmodified siRNA compounds, and such practice is within the disclosure. A composition that includes a RNAi agent can be delivered to a subject by a variety of routes. Exemplary routes include pulmonary system, intravenous, subcutaneous, and nasal.

[2662] The RNAi agents of the disclosure can be incorporated into pharmaceutical compositions suitable for administration. Such compositions typically include one or more species of RNAi agent and a pharmaceutically acceptable carrier. As used herein the language “pharmaceutically acceptable carrier” is intended to include any and all solvents, dispersion media, coatings, antibacterial and antifungal agents, isotonic and absorption delaying agents, and the like, compatible with pharmaceutical administration. The use of such media and agents for pharmaceutically active substances is well known in the art. Except insofar as any conventional media or agent is incompatible with the active compound, use thereof in the compositions is contemplated. Supplementary active compounds can also be incorporated into the compositions.

[2663] The pharmaceutical compositions of the present disclosure may be administered in a number of ways depending upon whether local or systemic treatment is desired and upon the area to be treated. Administration may be intratracheal, intranasal, oral, parenteral, or pulmonary, e.g., by inhalation or insufflation of powders or aerosols, including by nebulizer. Parenteral administration includes intravenous drip, subcutaneous, intraperitoneal, or intramuscular injection.

[2664] The route and site of administration may be chosen to enhance targeting. For example, to target muscle cells, intramuscular injection into the muscles of interest would be a logical choice. Lung cells might be targeted by administering the RNAi agent in powder or aerosol form. The vascular endothelial cells could be targeted by coating a balloon catheter with the RNAi agent and mechanically introducing the RNA.

[2665] Compositions for pulmonary system delivery may include aqueous solutions, e.g., for intranasal or oral inhalative administration, suitable carriers composed of, e.g., lipids (liposomes, niosomes, microemulsions, lipidic micelles, solid lipid nanoparticles) or polymers (polymer micelles, dendrimers, polymeric nanoparticles, nanogels, nanocapsules), adjuvant, e.g., for oral inhalative administration. Aqueous compositions may be sterile and may optionally contain buffers, diluents, absorption enhancers and other suitable additives. Such administration permits both systemic and local delivery of the double stranded RNAi agents of the invention.

[2666] Intranasal administration may include instilling or insufflating a double stranded RNAi agent into the nasal cavity with syringes or droppers by applying a few drops at a time or via atomization. Suitable dosage forms for intranasal administration include drops, powders, nebulized mists, and sprays. Nasal delivery devices include, but not limited to, vapor inhaler, nasal dropper, spray bottle, metered dose spray pump, gas driven spray atomizer, nebulizer, mechanical powder sprayer, breath actuated inhaler, and insufflator. Devices for delivery deeper into the respiratory system, e.g., into the lung, include nebulizer, pressured metered-dose inhaler, dry powder inhaler, and thermal vaporization aerosol device. Devices for delivery by inhalation are available from commercial suppliers. Devices can be fixed or variable dose, single or multidose, disposable or reusable depending on, for example, the disease or disorder to be prevented or treated, the volume of the agent to be delivered, the frequency of delivery of the agent, and other considerations in the art.

[2667] Oral inhalative administration may include use of device, e.g., a passive breath driven or active power driven single/-multiple dose dry powder inhaler (DPI), to deliver a double stranded RNAi agent to the pulmonary system. Suitable dosage forms for oral inhalative administration include powders and solutions. Suitable devices for oral inhalative administration include nebulizers, metered-dose inhalers, and dry powder inhalers. Dry powder inhalers are of the most popular devices used to deliver drugs, especially proteins to the lungs. Exemplary commercially available dry powder inhalers include Spinhaler (Fisons Pharmaceuticals, Rochester, NY) and Rotahaler (GSK, RTP, NC). Several types of nebulizers are available, namely jet nebulizers, ultrasonic nebulizers, vibrating mesh nebulizers. Jet nebulizers are driven by compressed air. Ultrasonic nebulizers use a piezoelectric transducer in order to create droplets from an open liquid reservoir. Vibrating mesh nebulizers use perforated membranes actuated by an annular piezoelement to vibrate in resonant bending mode. The holes in the membrane have a large cross-section size on the liquid supply side and a narrow cross-section size on the side from where the droplets emerge. Depending on the therapeutic application, the hole sizes and number of holes can be adjusted. Selection of a suitable device depends on parameters, such as nature of the drug and its formulation, the site of action, and pathophysiology of the lung. Aqueous suspensions and solutions are nebulized effectively. Aerosols based on mechanically generated vibration mesh technologies also have been used successfully to deliver proteins to lungs.

[2668] Formulations for topical administration may include transdermal patches, ointments, lotions, creams, gels, drops, suppositories, sprays, liquids, and powders. Conventional pharmaceutical carriers, aqueous, powder or oily bases, thickeners and the like may be necessary or desirable. Coated condoms, gloves, and the like may also be useful.

[2669] Compositions for oral administration include powders or granules, suspensions or solutions in water, syrups, elixirs or non-aqueous media, tablets, capsules, lozenges, or troches. In the case of tablets, carriers that can be used include lactose, sodium citrate and salts of phosphoric acid. Various disintegrants such as starch, and lubricating agents such as magnesium stearate, sodium lauryl sulfate and talc, are commonly used in tablets. For oral administration in capsule form, useful diluents are lactose and high molecular weight polyethylene glycols. When aqueous suspensions are required for oral use, the nucleic acid compositions can be combined with emulsifying and suspending agents. If desired, certain sweetening or flavoring agents can be added. Compositions suitable for oral administration of the agents of the invention are further described in PCT Application No. PCT/US20/33156, the entire contents of which are incorporated herein by reference.

[2670] Formulations for parenteral administration may include sterile aqueous solutions which may also contain buffers, diluents, and other suitable additives. Intraventricular injection may be facilitated by an intraventricular catheter, for example, attached to a reservoir. For intravenous use, the total concentration of solutes may be controlled to render the preparation isotonic.

[2671] In one embodiment, the administration of the siRNA compound, e.g., a double-stranded siRNA compound, is parenteral, e.g., intravenous (e.g., as a bolus or as a diffusible infusion), intradermal, intraperitoneal, intramuscular, subcutaneous, pulmonary system, or intranasal.

[2672] Administration can be provided by the subject or by another person, e.g., a health care provider. The medication can be provided in measured doses or in a dispenser which delivers a metered dose. Selected modes of delivery are discussed in more detail below.

### A. Vector Encoded RNAi Agents of the Disclosure

[2673] RNAi agents targeting the target gene can be expressed from transcription units inserted into DNA or RNA vectors (see, e.g., Couture, A, et al., TIG. (1996), 12:5-10; WO 00/22113, WO 00/22114, and U.S. Pat. No. 6,054,299). Expression can be sustained (months or longer), depending upon the specific construct used and the target tissue or cell type. These transgenes can be introduced as a linear construct, a circular plasmid, or a viral vector, which can be an integrating or non-integrating vector. The transgene can also be constructed to permit it to be inherited as an extrachromosomal plasmid (Gassmann, et al., (1995) Proc. Natl. Acad. Sci. USA 92:1292).

[2674] The individual strand or strands of a RNAi agent can be transcribed from a promoter on an expression vector. Where two separate strands are to be expressed to generate, for example, a dsRNA, two separate expression vectors can be co-introduced (e.g., by transfection or infection) into a target cell. Alternatively, each individual strand of a dsRNA can be transcribed by promoters both of which are located on the same expression plasmid. In one embodiment, a dsRNA is expressed as inverted repeat polynucleotides joined by a linker polynucleotide sequence such that the dsRNA has a stem and loop structure.

[2675] RNAi agent expression vectors are generally DNA plasmids or viral vectors. Expression vectors compatible with eukaryotic cells, such as those compatible with vertebrate cells, can be used to produce recombinant constructs for the expression of a RNAi agent as described herein. Delivery of RNAi agent expressing vectors can be systemic, such as by intravenous or intramuscular administration, by administration to target cells ex-planted from the patient followed by reintroduction into the patient, or by any other means that allows for introduction into a desired target cell.

[2676] Viral vector systems which can be utilized with the methods and compositions described herein include, but are not limited to, (a) adenovirus vectors; (b) retrovirus vectors, including but not limited to lentiviral vectors, moloney murine leukemia virus, etc.; (c) adeno- associated virus vectors; (d) herpes simplex virus vectors; (e) SV 40 vectors; (f) polyoma virus vectors; (g) papilloma virus vectors; (h) picornavirus vectors; (i) pox virus vectors such as an orthopox, e.g., vaccinia virus vectors or avipox, e.g. canary pox or fowl pox; and (j) a helper-dependent or gutless adenovirus. Replication-defective viruses can also be advantageous. Different vectors will or will not become incorporated into the cells' genome. The constructs can include viral sequences for transfection, if desired. Alternatively, the construct can be incorporated into vectors capable of episomal replication, e.g. EPV and EBV vectors. Constructs for the recombinant expression of a RNAi agent will generally require regulatory elements, e.g., promoters, enhancers, etc., to ensure the expression of the RNAi agent in target cells. Other aspects to consider for vectors and constructs are known in the art.

### V. Pharmaceutical Compositions of the Invention

[2677] The present disclosure also includes pharmaceutical compositions and formulations which include the RNAi agents of the disclosure. In one embodiment, provided herein are pharmaceutical compositions containing an RNAi agent, as described herein, and a pharmaceutically acceptable carrier. The pharmaceutical compositions containing the RNAi agent are useful for treating a skeletal muscle and/or a cardiac muscle disorder, disease or lung disorder or disease, or condition treatable by reduction or inhibition of the expression or activity of a target gene, e.g., a skeletal muscle and/or cardiac muscle disorder or disease or lung disease or disorder.

[2678] In some embodiments, the pharmaceutical compositions of the invention are sterile. In another embodiment, the pharmaceutical compositions of the invention are pyrogen free.

[2679] Such pharmaceutical compositions are formulated based on the mode of delivery. One example is compositions that are formulated for systemic administration via parenteral delivery, e.g., by intravenous (IV), intramuscular (IM), or for subcutaneous (subQ) delivery.

[2680] The pharmaceutical compositions of the disclosure may be administered in dosages sufficient to inhibit expression of a target gene. In general, a suitable dose of an RNAi agent of the disclosure will be in the range of about 0.001 to about 200.0 milligrams per kilogram body weight of the recipient per day, generally in the range of about 1 to 50 mg per kilogram body weight per day.

[2681] A repeat-dose regimen may include administration of a therapeutic amount of an RNAi agent on a regular basis, such as monthly to once every six months. In certain embodiments, the RNAi agent is administered about once per quarter (i.e., about once every three months) to about twice per year.

[2682] After an initial treatment regimen (e.g., loading dose), the treatments can be administered on a less frequent basis.

[2683] In other embodiments, a single dose of the pharmaceutical compositions can be long lasting, such that subsequent doses are administered at not more than 1, 2, 3, or 4 or more month intervals. In some embodiments of the disclosure, a single dose of the pharmaceutical compositions of the disclosure is administered once per month. In other embodiments of the disclosure, a single dose of the pharmaceutical compositions of the disclosure is administered once per quarter to twice per year.

[2684] The skilled artisan will appreciate that certain factors can influence the dosage and timing required to effectively treat a subject, including but not limited to the severity of the disease or disorder, previous treatments, the general health or age of the subject, and other diseases present. Moreover, treatment of a subject with a therapeutically effective amount of a composition can include a single treatment or a series of treatments.

[2685] Estimates of effective dosages and in vivo half-lives for the iRNAs encompassed by the disclosure can be made using conventional methodologies or on the basis of in vivo testing using a suitable animal model. A suitable animal model, e.g., a mouse or a rat, e.g., an animal containing a transgene expressing a skeletal muscle target gene and/or a cardiac muscle target gene or lung tissue target gene, can be used to determine the therapeutically effective dose and/or an effective dosage regimen for administration of an iRNA agent of the invention.

[2686] The pharmaceutical compositions of the present disclosure may be administered in a number of ways depending upon whether local or systemic treatment is desired and upon the area to be treated. Administration may be local (e.g., by intramuscular injection) or parenteral. Parenteral administration includes intravenous, intraarterial, subcutaneous, intraperitoneal or intramuscular injection or infusion; subdermal, e.g., via an implanted device.

[2687] Pharmaceutically acceptable organic or inorganic excipients suitable for non-parenteral administration which do not deleteriously react with nucleic acids can also be used to formulate the compositions of the present disclosure. Suitable pharmaceutically acceptable carriers include, but are not limited to, water, salt solutions, alcohols, polyethylene glycols, gelatin, lactose, amylose, magnesium stearate, talc, silicic acid, viscous paraffin, hydroxymethylcellulose, polyvinylpyrrolidone and the like.

[2688] Formulations for topical administration of nucleic acids can include sterile and non-sterile aqueous solutions, non-aqueous solutions in common solvents such as alcohols, or solutions of the nucleic acids in liquid or solid oil bases. The solutions can also contain buffers, diluents and other suitable additives. Pharmaceutically acceptable organic or inorganic excipients suitable for non-parenteral administration which do not deleteriously react with nucleic acids can be used.

[2689] Suitable pharmaceutically acceptable excipients include, but are not limited to, water, salt solutions, alcohol, polyethylene glycols, gelatin, lactose, amylose, magnesium stearate, talc, silicic acid, viscous paraffin, hydroxymethylcellulose, polyvinylpyrrolidone and the like.

[2690] The compositions of the present disclosure can additionally contain other adjunct components conventionally found in pharmaceutical compositions, at their art-established usage levels. Thus, for example, the compositions can contain additional, compatible, pharmaceutically-active materials such as, for example, antipruritics, astringents, local anesthetics or anti-inflammatory agents, or can contain additional materials useful in physically formulating various dosage forms of the compositions of the present disclosure, such as dyes, flavoring agents, preservatives, antioxidants, opacifiers, thickening agents and stabilizers. However, such materials, when added, should not unduly interfere with the biological activities of the components of the compositions of the present disclosure. The formulations can be sterilized and, if desired, mixed with auxiliary agents, e.g., lubricants, preservatives, stabilizers, wetting agents, emulsifiers, salts for influencing osmotic pressure, buffers, colorings, flavorings or aromatic substances and the like which do not deleteriously interact with the nucleic acid(s) of the formulation.

[2691] Aqueous suspensions can contain substances which increase the viscosity of the suspension including, for example, sodium carboxymethylcellulose, sorbitol or dextran. The suspension can also contain stabilizers.

[2692] In some embodiments, pharmaceutical compositions featured in the disclosure include (a) one or more RNAi agents and (b) one or more agents which function by a non-RNAi mechanism and which are useful in treating an muscular or pulmonary disorder or disease, e.g., DMD.

[2693] Toxicity and therapeutic efficacy of such compounds can be determined by standard pharmaceutical procedures in cell cultures or experimental animals, e.g., for determining the LD₅₀ (the dose lethal to 50% of the population) and the ED₅₀ (the dose therapeutically effective in 50% of the population). The dose ratio between toxic and therapeutic effects is the therapeutic index and it can be expressed as the ratio LD₅₀/ED₅₀. Compounds that exhibit high therapeutic indices are preferred.

[2694] The data obtained from cell culture assays and animal studies can be used in formulating a range of dosage for use in humans. The dosage of compositions featured herein in the disclosure lies generally within a range of circulating concentrations that include the ED₅₀ with little or no toxicity. The dosage can vary within this range depending upon the dosage form employed and the route of administration utilized. For any compound used in the methods featured in the disclosure, the therapeutically effective dose can be estimated initially from cell culture assays. A dose can be formulated in animal models to achieve a circulating plasma concentration range of the compound or, when appropriate, of the polypeptide product of a target sequence (e.g., achieving a decreased concentration of the polypeptide) that includes the IC₅₀ (i.e., the concentration of the test compound which achieves a half-maximal inhibition of symptoms) as determined in cell culture. Such information can be used to more accurately determine useful doses in humans. Levels in plasma can be measured, for example, by high performance liquid chromatography.

[2695] In addition to their administration, as discussed above, the RNAi agents featured in the disclosure can be administered in combination with other known agents effective in treatment of pathological processes mediated by nucleotide repeat expression. In any event, the administering physician can adjust the amount and timing of RNAi agent administration on the basis of results observed using standard measures of efficacy known in the art or described herein.

### VI. Kits

[2696] In certain aspects, the instant disclosure provides kits that include a suitable container containing a pharmaceutical formulation of a siRNA compound, e.g., a double-stranded siRNA compound, or ssiRNA compound, (e.g., a precursor, e.g., a larger siRNA compound which can be processed into a ssiRNA compound, or a DNA which encodes an siRNA compound, e.g., a double-stranded siRNA compound, or ssiRNA compound, or precursor thereof).

[2697] Such kits include one or more dsRNA agent(s) and instructions for use, e.g., instructions for administering a prophylactically or therapeutically effective amount of a dsRNA agent(s) provided herein. The dsRNA agent may be in a vial or a pre-filled syringe. The kits may optionally further comprise means for administering the dsRNA agent (e.g., an injection device, such as a pre-filled syringe ), or means for measuring the inhibition of the target gene (e.g., means for measuring the inhibition of the target gene mRNA, target gene protein, and/or target gene activity). Such means for measuring the inhibition of the target gene may comprise a means for obtaining a sample from a subject, such as, e.g., a plasma sample. The kits of the invention may optionally further comprise means for determining the therapeutically effective or prophylactically effective amount.

[2698] In certain embodiments the individual components of the pharmaceutical formulation may be provided in one container. Alternatively, it may be desirable to provide the components of the pharmaceutical formulation separately in two or more containers, e.g., one container for a siRNA compound preparation, and at least another for a carrier compound. The kit may be packaged in a number of different configurations such as one or more containers in a single box. The different components can be combined, e.g., according to instructions provided with the kit. The components can be combined according to a method described herein, e.g., to prepare and administer a pharmaceutical composition. The kit can also include a delivery device.

### X. Methods of the Invention

[2699] Another aspect of the invention relates to a method of reducing the expression of a target gene in a cell, comprising contacting the cell with a dsRNA agent of the invention. The methods include contacting the cell with a dsRNA of the disclosure and maintaining the cell for a time sufficient to obtain degradation of the mRNA transcripts of a target gene, thereby inhibiting expression of the target gene in the cell.

[2700] Reduction in gene expression can be assessed by any methods known in the art. For example, a reduction in the expression of a target may be determined by determining the mRNA expression level of the target gene using methods routine to one of ordinary skill in the art, e.g., northern blotting, qRT-PCR; by determining the protein level of a target protein using methods routine to one of ordinary skill in the art, such as western blotting, immunological techniques.

[2701] In the methods of the disclosure the extrahepatic cell, e.g., muscle cell, e.g., the skeletal muscle cell and/or cardiac muscle cell, or lung cell, may be contacted in vitro or in vivo, i.e., the cell may be within a subject. Contacting a cell in vivo with the RNAi agent includes contacting a cell or group of cells within a subject, e.g., a human subject, with the RNAi agent. Combinations of in vitro and in vivo methods of contacting a cell are also possible.

[2702] A cell suitable for treatment using the methods of the disclosure may be any cell that expresses a target gene. A cell suitable for use in the methods of the disclosure may be a mammalian cell, e.g., a primate cell (such as a human cell or a non-human primate cell, e.g., a monkey cell or a chimpanzee cell), a non-primate cell (such as a rat cell, or a mouse cell. In one embodiment, the cell is a human cell, e.g., a human muscle cell or a human lung cell.

[2703] Contacting a cell may be direct or indirect, as discussed above. Furthermore, contacting a cell may be accomplished via a targeting ligand, including any ligand described herein or known in the art.

[2704] The term “inhibiting,” as used herein, is used interchangeably with “reducing,” “silencing,” “downregulating,” “suppressing” and other similar terms, and includes any level of inhibition. In certain embodiments, a level of inhibition, e.g., for an RNAi agent of the instant disclosure, can be assessed in cell culture conditions, e.g., wherein cells in cell culture are transfected via Lipofectamine™-mediated transfection at a concentration in the vicinity of a cell of 10 nM or less, 1 nM or less, etc. Knockdown of a given RNAi agent can be determined via comparison of pre-treated levels in cell culture versus post-treated levels in cell culture, optionally also comparing against cells treated in parallel with a scrambled or other form of control RNAi agent. Knockdown in cell culture of, e.g., 50% or more, can thereby be identified as indicative of “inhibiting” or “reducing”, “downregulating” or “suppressing”, etc. having occurred. It is expressly contemplated that assessment of targeted mRNA or encoded protein levels (and therefore an extent of “inhibiting”, etc. caused by a RNAi agent of the disclosure) can also be assessed in in vivo systems for the RNAi agents of the instant disclosure, under properly controlled conditions as described in the art.

[2705] The phrase “inhibiting expression of a target gene” or “inhibiting expression of a target,” as used herein, includes inhibition of expression of any target gene (such as, e.g., a mouse target gene, a rat target gene, a monkey target gene, or a human target gene) as well as variants or mutants of a target gene that encode a target protein. Thus, the target gene may be a wild-type target gene, a mutant target gene, or a transgenic target gene in the context of a genetically manipulated cell, group of cells, or organism.

[2706] “Inhibiting expression of a target gene” includes any level of inhibition of a target gene, e.g., at least partial suppression of the expression of a target gene, such as an inhibition by at least 20%. In certain embodiments, inhibition is by at least 30%, at least 40%, at least 50%, at least about 60%, at least 70%, at least about 80%, at least 85%, at least 90%, at least 95%, at least 96%, at least 97%, at least 98%, or at least 99%; or to below the level of detection of the assay method. In certain method, inhibition is measured at a 10 nM concentration of the siRNA using a luciferase assay.

[2707] The expression of a target gene may be assessed based on the level of any variable associated with target gene expression, e.g., target mRNA level or target protein level.

[2708] Inhibition may be assessed by a decrease in an absolute or relative level of one or more of these variables compared with a control level. The control level may be any type of control level that is utilized in the art, e.g., a pre-dose baseline level, or a level determined from a similar subject, cell, or sample that is untreated or treated with a control (such as, e.g., buffer only control or inactive agent control).

[2709] In some embodiments of the methods of the disclosure, expression of a target gene is inhibited by at least 20%, 30%, 40%, 50%, 60%, 70%, 80%, 85%, 90%, or 95%, or to below the level of detection of the assay. In certain embodiments, the methods include a clinically relevant inhibition of expression of a target gene, e.g. as demonstrated by a clinically relevant outcome after treatment of a subject with an agent to reduce the expression of a target gene.

[2710] Inhibition of the expression of a target gene may be manifested by a reduction of the amount of mRNA expressed by a first cell or group of cells (such cells may be present, for example, in a sample derived from a subject) in which a target gene is transcribed and which has or have been treated (e.g., by contacting the cell or cells with a RNAi agent of the disclosure, or by administering a RNAi agent of the disclosure to a subject in which the cells are or were present) such that the expression of a target gene is inhibited, as compared to a second cell or group of cells substantially identical to the first cell or group of cells but which has not or have not been so treated (control cell(s) not treated with a RNAi agent or not treated with a RNAi agent targeted to the genome of interest). The degree of inhibition may be expressed in terms of

$$\frac{( mRNA in control cells ) - ( mRNA in treated cells )}{( mRNA in control cells )} \cdot 100 \%$$

[2711] In other embodiments, inhibition of the expression of a target gene may be assessed in terms of a reduction of a parameter that is functionally linked to a target gene expression, e.g., target protein expression. Target gene silencing may be determined in any cell expressing a target gene, either endogenous or heterologous from an expression construct, and by any assay known in the art.

[2712] Inhibition of the expression of a target protein may be manifested by a reduction in the level of the target protein that is expressed by a cell or group of cells (e.g., the level of protein expressed in a sample derived from a subject). As explained above, for the assessment of genome suppression, the inhibition of protein expression levels in a treated cell or group of cells may similarly be expressed as a percentage of the level of protein in a control cell or group of cells.

[2713] A control cell or group of cells that may be used to assess the inhibition of the expression of a target gene includes a cell or group of cells that has not yet been contacted with an RNAi agent of the disclosure. For example, the control cell or group of cells may be derived from an individual subject (e.g., a human or animal subject) prior to treatment of the subject with an RNAi agent.

[2714] The level of target gene mRNA that is expressed by a cell or group of cells may be determined using any method known in the art for assessing RNA expression. In one embodiment, the level of expression of target gene in a sample is determined by detecting a transcribed polynucleotide, or portion thereof, e.g., mRNA of the target gene. RNA may be extracted from cells using RNA extraction techniques including, for example, using acid phenol/guanidine isothiocyanate extraction (RNAzol B; Biogenesis), RNeasy™ RNA preparation kits (Qiagen®) or PAXgene (PreAnalytix, Switzerland). Typical assay formats utilizing ribonucleic acid hybridization include nuclear run-on assays, RT-PCR, RNase protection assays, northern blotting, in situ hybridization, and microarray analysis. Circulating target mRNA may be detected using methods the described in WO2012/177906, the entire contents of which are hereby incorporated herein by reference.

[2715] In some embodiments, the level of expression of target gene is determined using a nucleic acid probe. The term “probe”, as used herein, refers to any molecule that is capable of selectively binding to a specific target nucleic acid or protein, or fragment thereof. Probes can be synthesized by one of skill in the art, or derived from appropriate biological preparations. Probes may be specifically designed to be labeled. Examples of molecules that can be utilized as probes include, but are not limited to, RNA, DNA, proteins, antibodies, and organic molecules.

[2716] Isolated mRNA can be used in hybridization or amplification assays that include, but are not limited to, Southern or northern analyses, polymerase chain reaction (PCR) analyses and probe arrays. One method for the determination of RNA levels involves contacting the isolated RNA with a nucleic acid molecule (probe) that can hybridize to target RNA. In one embodiment, the RNA is immobilized on a solid surface and contacted with a probe, for example by running the isolated RNA on an agarose gel and transferring the RNA from the gel to a membrane, such as nitrocellulose. In an alternative embodiment, the probe(s) are immobilized on a solid surface and the RNA is contacted with the probe(s), for example, in an Affymetrix® gene chip array. A skilled artisan can readily adapt known RNA detection methods for use in determining the level of target mRNA.

[2717] An alternative method for determining the level of expression of target in a sample involves the process of nucleic acid amplification or reverse transcriptase (to prepare cDNA) of for example mRNA in the sample, e.g., by RT-PCR (the experimental embodiment set forth in Mullis, 1987, U.S. Pat. No. 4,683,202), ligase chain reaction (Barany (1991) Proc. Natl. Acad. Sci. USA 88:189-193), self sustained sequence replication (Guatelli et al. (1990) Proc. Natl. Acad. Sci. USA 87:1874-1878), transcriptional amplification system (Kwoh et al. (1989) Proc. Natl. Acad. Sci. USA 86:1173-1177), Q-Beta Replicase (Lizardi et al. (1988) Bio/Technology 6:1197), rolling circle replication (Lizardi et al., U.S. Pat. No. 5,854,033) or any other nucleic acid amplification method, followed by the detection of the amplified molecules using techniques well known to those of skill in the art. These detection schemes are especially useful for the detection of nucleic acid molecules if such molecules are present in very low numbers. In particular aspects of the disclosure, the level of expression of target is determined by quantitative fluorogenic RT-PCR (i.e., the TaqMan™ System), by a Dual-Glo® Luciferase assay, or by other art-recognized method for measurement of target expression or mRNA level.

[2718] The expression level of target mRNA may be monitored using a membrane blot (such as used in hybridization analysis such as northern, Southern, dot, and the like), or microwells, sample tubes, gels, beads or fibers (or any solid support comprising bound nucleic acids). See U.S. Pat. Nos. 5,770,722, 5,874,219, 5,744,305, 5,677,195 and 5,445,934, which are incorporated herein by reference. The determination of target expression level may also comprise using nucleic acid probes in solution.

[2719] In some embodiments, the level of RNA expression is assessed using branched DNA (bDNA) assays or real time PCR (qPCR). The use of this PCR method is described and exemplified in the Examples presented herein. Such methods can also be used for the detection of target nucleic acids.

[2720] The level of target protein expression may be determined using any method known in the art for the measurement of protein levels. Such methods include, for example, electrophoresis, capillary electrophoresis, high performance liquid chromatography (HPLC), thin layer chromatography (TLC), hyperdiffusion chromatography, fluid or gel precipitin reactions, absorption spectroscopy, a colorimetric assays, spectrophotometric assays, flow cytometry, immunodiffusion (single or double), immunoelectrophoresis, western blotting, radioimmunoassay (RIA), enzyme-linked immunosorbent assays (ELISAs), immunofluorescent assays, electrochemiluminescence assays, and the like. Such assays can also be used for the detection of proteins indicative of the presence or replication of target proteins.

[2721] In some embodiments, the efficacy of the methods of the disclosure in the treatment of a target gene-related disease is assessed by a decrease in target mRNA level (e.g, by assessment of a blood target gene level, or otherwise).

[2722] In some embodiments, the efficacy of the methods of the disclosure in the treatment of a target gene-related disease is assessed by a decrease in target mRNA level (e.g, by assessment of a muscle or lung sample for target level, by biopsy, or otherwise). In some embodiments of the methods of the disclosure, the RNAi agent is administered to a subject such that the RNAi agent is delivered to a specific site within the subject. The inhibition of expression of target may be assessed using measurements of the level or change in the level of target mRNA or target protein in a sample derived from a specific site within the subject, e.g., muscle or lung cells. In certain embodiments, the methods include a clinically relevant inhibition of expression of target, e.g. as demonstrated by a clinically relevant outcome after treatment of a subject with an agent to reduce the expression of target gene.

[2723] As used herein, the terms detecting or determining a level of an analyte are understood to mean performing the steps to determine if a material, e.g., protein, RNA, is present. As used herein, methods of detecting or determining include detection or determination of an analyte level that is below the level of detection for the method used.

[2724] The in vivo methods of the disclosure may include administering to a subject a composition containing a RNAi agent, where the RNAi agent includes a nucleotide sequence that is complementary to at least a part of an RNA transcript of the target gene of the subject to be treated. When the organism to be treated is a mammal such as a human, the composition can be administered by means including, but not limited to intraperitoneal or parenteral routes, including intravenous, intramuscular, subcutaneous, transdermal, airway (aerosol), nasal, administration. In certain embodiments, the compositions are administered by intravenous infusion or injection. In certain embodiments, the compositions are administered by subcutaneous injection. In certain embodiments, the compositions are administered by pulmonary delivery, e.g., oral inhalation or intranasal delivery.

[2725] In some embodiments, the administration is via a depot injection. A depot injection may release the RNAi agent in a consistent way over a prolonged time period. Thus, a depot injection may reduce the frequency of dosing needed to obtain a desired effect, e.g., a desired inhibition of the target gene, or a therapeutic or prophylactic effect. A depot injection may also provide more consistent serum concentrations. Depot injections may include subcutaneous injections or intramuscular injections. In certain embodiments, the depot injection is a subcutaneous injection.

[2726] In one embodiment, the double-stranded RNAi agent is administered by pulmonary system administration, e.g., intranasal administration or oral inhalative administration. Pulmonary system administration may be via a syringe, a dropper, atomization, or use of device, e.g., a passive breath driven or active power driven single/-multiple dose dry powder inhaler (DPI) device.

[2727] The mode of administration may be chosen based upon whether local or systemic treatment is desired and based upon the area to be treated. The route and site of administration may be chosen to enhance targeting.

[2728] In one aspect, the present disclosure also provides methods for inhibiting the expression of a target gene in a mammal. The methods include administering to the mammal a composition comprising a dsRNA that targets a target gene in a cell of the mammal and maintaining the mammal for a time sufficient to obtain degradation of the RNA transcript of the target gene, thereby inhibiting expression of the target gene in the cell. Reduction in genome expression can be assessed by any methods known it the art and by methods, e.g. qRT-PCR, described herein. Reduction in protein production can be assessed by any methods known it the art and by methods, e.g. ELISA, described herein.

[2729] The present disclosure further provides methods of treatment of a subject in need thereof. The treatment methods of the disclosure include administering an RNAi agent of the disclosure to a subject, e.g., a subject that would benefit from inhibition of target gene expression, in a therapeutically effective amount of a RNAi agent targeting a target gene or a pharmaceutical composition comprising a RNAi agent targeting a target gene.

[2730] Target genes (described above), target gene-associated disorders, and subjects that would benefit from a reduction or inhibition of target gene expression, e.g., those having a target gene-associated disease, subjects at risk of developing a target gene-associate disease, are described below.

[2731] An RNAi agent of the disclosure may be administered as a “free RNAi agent.” A free RNAi agent is administered in the absence of a pharmaceutical composition. The naked RNAi agent may be in a suitable buffer solution. The buffer solution may comprise acetate, citrate, prolamine, carbonate, or phosphate, or any combination thereof. In one embodiment, the buffer solution is phosphate buffered saline (PBS). The pH and osmolarity of the buffer solution containing the RNAi agent can be adjusted such that it is suitable for administering to a subject. In certain embodiments, the free RNAi agent may be formulated in water or normal saline.

[2732] Alternatively, an RNAi agent of the disclosure may be administered as a pharmaceutical composition, such as a dsRNA liposomal formulation.

[2733] In one aspect, the present invention provides a method of treating a subject having a muscle disorder, e.g., a skeletal muscle disorder and/or a cardiac muscle disorder, comprising administering to the subject a therapeutically effective amount of a dsRNA agent of the invention, thereby treating the subject.

[2734] Exemplary muscle disorders include Myostatin-related muscle hypertrophy, congenital myasthenic syndrome, facioscapulohumeral muscular dystrophy (FSHD), Spinal Muscular Atrophy (SMA), Myotonic Dystrophy Type 1 (DM1), Pompe disease, PLN cardiomyopathy, spasticity, obstructive hypertrophic cardiomyopathy (HOCM); familial hypertrophic cardiomyopathy (FHC); Heart failure with preserved ejection fraction (HFPEF); atrial fibrillation (AFIB); ventricular fibrillation (VFIB); angina; myocardial infarction (MI); heart failure or heart failure with reduced ejection fraction (HFREF); supraventricular tachycardia (SVT); hypertrophic cardiomyopathy (HCM); and PLN cardiomyopathy.

[2735] Exemplary cardiac muscle disorders include obstructive hypertrophic cardiomyopathy (HOCM); familial hypertrophic cardiomyopathy (FHC); Heart failure with preserved ejection fraction (HFPEF); atrial fibrillation (AFIB); ventricular fibrillation (VFIB); angina; myocardial infarction (MI); heart failure or heart failure with reduced ejection fraction (HFREF); supraventricular tachycardia (SVT); hypertrophic cardiomyopathy (HCM); and PLN cardiomyopathy.

[2736] Exemplary skeletal muscle disorders include Myostatin-related muscle hypertrophy, congenital myasthenic syndrome, facioscapulohumeral muscular dystrophy (FSHD), Spinal Muscular Atrophy (SMA), Myotonic Dystrophy Type 1 (DM1), Pompe disease, PLN cardiomyopathy, and spasticity.

[2737] In one aspect, the present invention provides a method of treating a subject having a lung disorder, comprising administering to the subject a therapeutically effective amount of a dsRNA agent of the invention, thereby treating the subject.

[2738] Exemplary lung disorders include pulmonary fibrosis e.g. idiopathic pulmonary fibrosis, non-specific interstitial pneumonia (NSIP), usual interstitial pneumonia (UIP), Hermansky-Pudlak syndrome, progressive massive fibrosis (a complication of coal workers' pneumoconiosis), connective tissue disease-related pulmonary fibrosis, airway fibrosis in asthma and COPD, acute respiratory distress syndrome (ARDS) associated fibrosis, acute lung injury; radiation-induced fibrosis; familial pulmonary fibrosis; pulmonary hypertension, asthma, asthma and chronic rhinosinusitis, and nasal polyps and chronic rhinosinusitis.

[2739] The dsRNA agent of the invention can be delivered to a subject by a variety of routes, depending on the type of genes targeted and the type of disorders to be treated. In some embodiments, the dsRNA agent is administered extra-hepatically, such as intravenous, intramuscular, or subcutaneous administration.

[2740] The disclosure further provides methods for the use of a RNAi agent or a pharmaceutical composition thereof, e.g., for treating a subject that would benefit from reduction or inhibition of target gene expression, e.g., a subject having a target-gene-associated disorder, in combination with other pharmaceuticals or other therapeutic methods, e.g., with known pharmaceuticals or known therapeutic methods, such as, for example, those which are currently employed for treating these disorders.

[2741] Examples of the additional therapeutic agents which can be used with an RNAi agent of the invention include, but are not limited to, cardiovascular diseases-treating agents, anti-hyperlipemic agents, hypotensive or antihypertensive agents, chemotherapeutic agents, immunotherapeutic agents, immunosuppressive agents, nonsteroidal anti-inflammatory drugs (NSAIDs), colchicine, corticosteroids, and the like. Such combination therapies may advantageously utilize lower dosages of the administered therapeutic agents, thus avoiding possible toxicities or complications associated with the various monotherapies.

[2742] Anti-hyperlipemic agents include, for example, statin-based compounds which are cholesterol synthesis inhibitors (e.g., pravastatin, simvastatin, lovastatin, atorvastatin, fluvastatin, rosuvastatin and the like), squalene synthetase inhibitors or fibrate compounds having a triglyceride-lowering effect (e.g., fenofibrate, gemfibrozil, bezafibrate, clofibrate, sinfibrate, clinofibrate and the like), niacin, PCSK9 inhibitors, triglyceride lowing agents or cholesterol sequesting agents.

[2743] Hypotensive agents include, for example, angiotensin converting enzyme inhibitors (e.g., captopril, enalapril, delapril, benazepril, cilazapril, enalapril, enalaprilat, fosinopril, lisinopril, moexipril, perindopril, quinapril, ramipril, trandolapril and the like) or angiotensin II antagonists (e.g., losartan, candesartan cilexetil, olmesartan medoxomil, eprosartan, valsartan, telmisartan, irbesartan, tasosartan, pomisartan, ripisartan forasartan, and the like) or calcium channel blockers (e.g., amlodipine) or aspirin.

[2744] In addition, agents whose cachexia improving effect has been established in an animal model or at a clinical stage, such as cyclooxygenase inhibitors (e.g., indomethacin and the like), progesterone derivatives (e.g., megestrol acetate), glucosteroid (e.g., dexamethasone and the like), metoclopramide-based agents, tetrahydrocannabinol-based agents, lipid metabolism improving agents (e.g., eicosapentanoic acid and the like), growth hormones, IGF-1, antibodies against TNF-α, LIF, IL-6 and oncostatin M may also be employed concomitantly with an RNAi agent according to the present invention. Additional therapeutic agents for use in the treatment of diseases or conditions related to metabolic disorders and/or impaired neurological signaling would be apparent to the skilled artisan and are within the scope of this disclosure.

[2745] The RNAi agent and additional therapeutic agents may be administered at the same time or in the same combination, or the additional therapeutic agent can be administered as part of a separate composition or at separate times or by another method known in the art or described herein.

[2746] In one embodiment, the method includes administering a composition featured herein such that expression of the target gene is decreased, for at least one month. In some embodiments, expression is decreased for at least 2 months, 3 months, or 6 months.

[2747] In certain embodiments, administration includes a loading dose administered at a higher frequency, e.g., once per day, twice per week, once per week, for an initial dosing period, e.g., 2-4 doses.

[2748] In some embodiments, the RNAi agents useful for the methods and compositions featured herein specifically target RNAs (primary or processed) of the target gene. Compositions and methods for inhibiting the expression of these genes using RNAi agents can be prepared and performed as described herein.

[2749] Administration of the dsRNA according to the methods of the disclosure may result in a reduction of the severity, signs, symptoms, or markers of such diseases or disorders in a patient with a target gene-associated disorder. By “reduction” in this context is meant a statistically significant or clinically significant decrease in such level. The reduction can be, for example, at least 5%, 10%, 15%, 20%, 25%, 30%, 35%, 40%, 45%, 50%, 55%, 60%, 65%, 70%, 75%, 80%, 85%, 90%, 95%, or about 100%.

[2750] Efficacy of treatment or prevention of disease can be assessed, for example by measuring disease progression, disease remission, symptom severity, reduction in pain, quality of life, dose of a medication required to sustain a treatment effect, level of a disease marker or any other measurable parameter appropriate for a given disease being treated or targeted for prevention. It is well within the ability of one skilled in the art to monitor efficacy of treatment or prevention by measuring any one of such parameters, or any combination of parameters. It is well within the ability of one skilled in the art to monitor efficacy of treatment or prevention by measuring any one of such parameters, or any combination of parameters. In connection with the administration of a RNAi agent targeting a target gene of interest or pharmaceutical composition thereof, “effective against” a target gene-associated disorder indicates that administration in a clinically appropriate manner results in a beneficial effect for at least a statistically significant fraction of patients, such as an improvement of symptoms, a cure, a reduction in disease, extension of life, improvement in quality of life, or other effect generally recognized as positive by medical doctors familiar with treating target gene-associated disorders and the related causes.

[2751] A treatment or preventive effect is evident when there is a statistically significant improvement in one or more parameters of disease status, or by a failure to worsen or to develop symptoms where they would otherwise be anticipated. As an example, a favorable change of at least 10% in a measurable parameter of disease, and at least 20%, 30%, 40%, 50%, or more can be indicative of effective treatment. Efficacy for a given RNAi agent drug or formulation of that drug can also be judged using an experimental animal model for the given disease as known in the art. When using an experimental animal model, efficacy of treatment is evidenced when a statistically significant reduction in a marker or symptom is observed.

[2752] Alternatively, the efficacy can be measured by a reduction in the severity of disease as determined by one skilled in the art of diagnosis based on a clinically accepted disease severity grading scale. Any positive change resulting in e.g., lessening of severity of disease measured using the appropriate scale, represents adequate treatment using a RNAi agent or RNAi agent formulation as described herein.

[2753] Subjects can be administered a therapeutic amount of dsRNA, such as about 0.01 mg/kg to about 200 mg/kg.

[2754] The RNAi agent can be administered over a period of time, on a regular basis. In certain embodiments, after an initial treatment regimen, the treatments can be administered on a less frequent basis. Administration of the RNAi agent can reduce target gene levels, e.g., in a cell, tissue, blood sample or other compartment of the patient by at least 20%, 30%, 40%, 50%, 55%, 60%, 65%, 70,% 75%, 80%, 85%, 90%, 95%, 96%, 97%, 98%, or at least about 99% or more. In one embodiment, administration of the RNAi agent can reduce target gene levels, e.g., in a cell, tissue, blood sample, or other compartment of the patient by at least 50%.

[2755] Before administration of a full dose of the RNAi agent, patients can be administered a smaller dose, such as a 5% infusion reaction, and monitored for adverse effects, such as an allergic reaction. In another example, the patient can be monitored for unwanted immunostimulatory effects, such as increased cytokine (e.g., TNF-alpha or INF-alpha) levels.

[2756] Alternatively, the RNAi agent can be administered by oral administration, pulmonary administration, intravenously, i.e., by intravenous injection, or subcutaneously, i.e., by subcutaneous injection. One or more injections may be used to deliver the desired, e.g., monthly dose of RNAi agent to a subject. The injections may be repeated over a period of time. The administration may be repeated on a regular basis. In certain embodiments, after an initial treatment regimen, the treatments can be administered on a less frequent basis. A repeat-dose regimen may include administration of a therapeutic amount of RNAi agent on a regular basis, such as monthly or extending to once a quarter, twice per year, once per year. In certain embodiments, the RNAi agent is administered about once per month to about once per quarter (i.e., about once every three months).

### XI. Target Genes and Target-Gene-Associated Diseases

[2757] Specific exemplary target genes that mediate a muscle disorder, e.g., a skeletal muscle disorder and/or cardiac muscle disorder, include, but are not limited to, adrenoceptor beta 1 (ADRB1); calcium voltage-gated channel subunit alpha1 C (CACNA1C); calcium voltage-gated channel subunit alpha1 G (CACNA1G) (T type calcium cchannel); angiotensin II receptor type 1 (AGTR1); Sodium Voltage-Gated Channel Alpha Subunit 2 (SCN2A); Hyperpolarization Activated Cyclic Nucleotide Gated Potassium Channel 1 (HCN1); Hyperpolarization Activated Cyclic Nucleotide Gated Potassium Channel 4 (HCN4); Hyperpolarization Activated Cyclic Nucleotide Gated Potassium Channel 3 (HCN3); Potassium Voltage-Gated Channel Subfamily A Member 5 (KCNA5); Potassium Inwardly Rectifying Channel Subfamily J Member 3 (KCNJ3); Potassium Inwardly Rectifying Channel Subfamily J Member 4 (KCNJ4); phospholamban (PLN); calcium/calmodulin dependent protein kinase II delta (CAMK2D); or Phosphodiesterase 1 (PDE1), myostatin (MSTN); Cholinergic Receptor Nicotinic Alpha 1 Subunit (CHRNA1); Cholinergic Receptor Nicotinic Beta 1 Subunit (CHRNB1); Cholinergic Receptor Nicotinic Delta Subunit (CHRND); Cholinergic Receptor Nicotinic Epsilon Subunit (CHRNE); Cholinergic Receptor Nicotinic Gamma Subunit (CHRNG); Collagen Type XIII Alpha 1 Chain (COL13A1); Docking Protein 7 (DOK7); LDL Receptor Related Protein 4 (LRP4); Muscle Associated Receptor Tyrosine Kinase (MUSK); Receptor Associated Protein Of The Synapse (RAPSN); Sodium Voltage-Gated Channel Alpha Subunit 4 (SCN4A); Double Homeobox 4 (DUX4), dystrophy myotonic protein kinase (DMPK), glycogen synthase 1 (GYS1), survival of motor neuron 1 (SMN1), and alpha-glucosidase (GAA).

[2758] Exemplary target genes that mediate a skeletal muscle disorder include, but are not limited to, myostatin (MSTN); Cholinergic Receptor Nicotinic Alpha 1 Subunit (CHRNA1); Cholinergic Receptor Nicotinic Beta 1 Subunit (CHRNB1); Cholinergic Receptor Nicotinic Delta Subunit (CHRND); Cholinergic Receptor Nicotinic Epsilon Subunit (CHRNE); Cholinergic Receptor Nicotinic Gamma Subunit (CHRNG); Collagen Type XIII Alpha 1 Chain (COL13A1); Docking Protein 7 (DOK7); LDL Receptor Related Protein 4 (LRP4); Muscle Associated Receptor Tyrosine Kinase (MUSK); Receptor Associated Protein Of The Synapse (RAPSN); Sodium Voltage-Gated Channel Alpha Subunit 4 (SCN4A); and Double Homeobox 4 (DUX4), dystrophy myotonic protein kinase (DMPK), glycogen synthase 1 (GYS1), survival of motor neuron 1 (SMN1), and alpha-glucosidase (GAA).

[2759] Exemplary target genes that mediate a cardiac muscle disorder include, but are not limited to, adrenoceptor beta 1 (ADRB1); calcium voltage-gated channel subunit alpha1 C (CACNA1C); calcium voltage-gated channel subunit alpha1 G (CACNA1G) (T type calcium cchannel); angiotensin II receptor type 1 (AGTR1); Sodium Voltage-Gated Channel Alpha Subunit 2 (SCN2A); Hyperpolarization Activated Cyclic Nucleotide Gated Potassium Channel 1 (HCN1); Hyperpolarization Activated Cyclic Nucleotide Gated Potassium Channel 4 (HCN4); Hyperpolarization Activated Cyclic Nucleotide Gated Potassium Channel 3 (HCN3); Potassium Voltage-Gated Channel Subfamily A Member 5 (KCNA5); Potassium Inwardly Rectifying Channel Subfamily J Member 3 (KCNJ3); Potassium Inwardly Rectifying Channel Subfamily J Member 4 (KCNJ4); phospholamban (PLN); calcium/calmodulin dependent protein kinase II delta (CAMK2D); or Phosphodiesterase 1 (PDE1).

[2760] Exemplary target genes that mediate a lung disorder include, but are not limited to, MUC5B, TSLP, IL33, ALOX15, AGER(RAGE), MUC5AC, and STAT6.

[2761] In some embodiments, the present invention provides a double-stranded iRNA agent that targets ADRB1 for the treatment of obstructive hypertrophic cardiomyopathy (HOCM); familial hypertrophic cardiomyopathy (FHC); heart failure with preserved ejection fraction (HF-pEF); atrial fibrillation (AFIB); ventricular fibrillation (VFIB); angina; myocardial infarction (MI); and/or heart failure or heart failure with reduced ejection fraction (HFREF).

[2762] In some embodiments, the present invention provides a double-stranded iRNA agent that targets CACNA1C for the treatment of supraventricular tachycardia (SVT); AFIB; Angina; and/or HOCM.

In some embodiments, the present invention provides a double-stranded iRNA agent that targets CACNA1G for the treatment of supraventricular tachycardia (SVT); and/or angina.

[2763] In some embodiments, the present invention provides a double-stranded iRNA agent that targets AGTR1 for the treatment of HOCM; hypertrophic cardiomyopathy (HCM); and/or HF-pEF. In some embodiments, the present invention provides a double-stranded iRNA agent that targets SCN2A for the prevention and/or treatment of AFIB.

[2764] In some embodiments, the present invention provides a double-stranded iRNA agent that targets HCN1 for the prevention and/or treatment of AFIB; treatment, e.g., rate control, in HOCM.

[2765] In some embodiments, the present invention provides a double-stranded iRNA agent that targets HCN4 for the prevention and/or treatment of AFIB; treatment, e.g., rate control, in HOCM.

[2766] In some embodiments, the present invention provides a double-stranded iRNA agent that targets HCN3 for the prevention and/or treatment of AFIB; treatment, e.g., rate control, in HOCM.

[2767] In some embodiments, the present invention provides a double-stranded iRNA agent that targets KCNA5 for the prevention and/or treatment of AFIB, e.g., AFIB in congestive heart failure (CHF).

[2768] In some embodiments, the present invention provides a double-stranded iRNA agent that targets KCNJ3 for the prevention and/or treatment of AFIB.

[2769] In some embodiments, the present invention provides a double-stranded iRNA agent that targets KCNJ4 for the prevention and/or treatment of AFIB.

[2770] In some embodiments, the present invention provides a double-stranded iRNA agent that targets CAMK2D for the prevention and/or treatment of heart failure and/or AFIB.

[2771] In some embodiments, the present invention provides a double-stranded iRNA agent that targets PLN for the prevention and/or treatment of HF-rEF, arrhythmia, and/or cardiomyopathy. In some embodiments, the present invention provides a double-stranded iRNA agent that targets PDE1 for the prevention and/or treatment of CHF and/or HF-pEF.

[2772] In some embodiment, the present invention provides a double-stranded iRNA agent that targets myostatin for the treatment of Myostatin-related muscle dystrophy.

[2773] In some embodiments, the present invention provides a double-stranded iRNA agent that targets CHRNA1 for the treatment of congenital myasthenic syndrome (CMS).

[2774] In some embodiments, the present invention provides a double-stranded iRNA agent that targets CHRNB1 for the treatment of congenital myasthenic syndrome (CMS).

[2775] In some embodiments, the present invention provides a double-stranded iRNA agent that targets CHRBD for the treatment of congenital myasthenic syndrome (CMS).

[2776] In some embodiments, the present invention provides a double-stranded iRNA agent that targets CHRNE for the treatment of congenital myasthenic syndrome (CMS).

[2777] In some embodiments, the present invention provides a double-stranded iRNA agent that targets CHRNG for the treatment of congenital myasthenic syndrome (CMS).

[2778] In some embodiments, the present invention provides a double-stranded iRNA agent that targets COL 13A1 for the treatment of congenital myasthenic syndrome (CMS).

[2779] In some embodiments, the present invention provides a double-stranded iRNA agent that targets LRP4 for the treatment of congenital myasthenic syndrome (CMS).

[2780] In some embodiments, the present invention provides a double-stranded iRNA agent that targets MUSK for the treatment of congenital myasthenic syndrome (CMS).

[2781] In some embodiments, the present invention provides a double-stranded iRNA agent that targets RAPSN for the treatment of congenital myasthenic syndrome.

[2782] In some embodiments, the present invention provides a double-stranded iRNA agent that targets SCN4A for the treatment of congenital myasthenic syndrome (CMS).

[2783] In some embodiments, the present invention provides a double-stranded iRNA agent that targets DOK7 for the treatment of congenital myasthenic syndrome (CMS).

[2784] In some embodiments, the present invention provides a double-stranded iRNA agent that targets DUX4 for the treatment of Facioscapulohumeral muscular dystrophy (FSHD).

[2785] In some embodiments, the present invention provides a double-stranded iRNA agent that targets DMPK for the treatment of myotonic dystrophy.

[2786] In some embodiments, the present invention provides a double-stranded iRNA agent that targets GYS1 for the treatment of glycogen storage disease.

[2787] In some embodiments, the present invention provides a double-stranded iRNA agent that targets SMN1 for the treatment of spinal muscular atrophy.

[2788] In some embodiments, the present invention provides a double-stranded iRNA agent that targets GAA for the treatment of Pompe disease.

[2789] In some embodiments, the present invention provides a double-stranded iRNA agent that targets ADRB1 for the treatment of obstructive hypertrophic cardiomyopathy (HOCM); familial hypertrophic cardiomyopathy (FHC); heart failure with preserved ejection fraction (HF-pEF); atrial fibrillation (AFIB); ventricular fibrillation (VFIB); angina; myocardial infarction (MI); and/or heart failure or heart failure with reduced ejection fraction (HFREF).

[2790] In some embodiments, the present invention provides a double-stranded iRNA agent that targets MUC5B for the treatment of idiopathic pulmonary fibrosis.

[2791] In some embodiments, the present invention provides a double-stranded iRNA agent that targets TSLP for the treatment of asthma.

[2792] In some embodiments, the present invention provides a double-stranded iRNA agent that targets IL33 for the treatment of asthma and chronic rhinosinusitis.

[2793] In some embodiments, the present invention provides a double-stranded iRNA agent that targets ALOX15 for the treatment of nasal polyps and chronic rhinosinusitis.

[2794] In some embodiments, the present invention provides a double-stranded iRNA agent that targets STAT6 for the treatment of pulmonary fibrosis or asthma.

Targeting ADRB1 for the Prevention and or Treatment of HOCM, FHC, HFPEF, AFIB, VFIB, Angina, MI, and/or HFREF

[2795] The beta-adrenergic receptors (ADRBs) are part of a family of membrane proteins known as G-protein coupled receptors where, upon binding of a catecholamine to the receptor, stimulates a conformational change in the ADRB that causes coupling with G-proteins. G-proteins consist of a, p, and y subunits and ADRB coupling leads to the dissociation of the G-protein into active Ga and GD subunits to mediate downstream signaling.

[2796] Beta-adrenergic receptors (ADRBs) play an important role in the extrinsic control of cardiac contractility and function, and are important drug targets for cardiovascular conditions such as hypertension and congestive heart failure. Inhaled beta-receptor (e.g. “beta-blockers”) remain among the mostly commonly prescribed medications in adults to treat cardiovascular disease.

[2797] There are three subtypes of ADRBs (ADRB1, ADRB2 and ADRB3). ADRB1s are the predominant subtype expressed in the heart. Multiple ADRB1 have been described and found to be associated with various cardiovascular phenotypes, such as hypertension, heart failure, higher heart rates, or response to beta-blocker therapy. Genetic variants of the ADRB1 have also been shown to modulate the cardiac responses to catecholamine binding. In addition, ADRB1 signaling has also been shown to play an important role in heart failure (HF), where beta-blocking medications are widely used therapeutic agents. Deleterious effects of ADRB1 signaling include apoptosis, myocyte growth, fibroblast hyperplasia, myopathy, fetal gene induction and proarrhythmia (Mann D L, et al. Circulation. 1992; 85(2):790-804). As an adaptive mechanism in HF, cardiac ADRB1s become less responsive, either downregulating or uncoupling from the G protein pathway (Bristow M R, et al. N Engl J Med. 1982; 307(4):205-211). With respect to atrial fibrillation, ADRB1 variant carriers have been reported to have an increased risk of atrial fibrillation, and higher heart rates during atrial fibrillation. ADRB1 polymorphisms are also associated with ventricular fibrillation (VF) in the context of myocardial infarction (MI).

### Targeting CACNA1C for the Prevention and or Treatment of SVT, AFIB, Angina, and or HOCM

[2798] Supraventricular tachycardia (SVT) is a heterogeneous category of cardiac arrhythmias characterized by a fast or tachycardiac rhythm that originates above the atrioventricular (AV) node. The prevalence of SVT is 2.25/1000 persons with a female predominance of 2:1 across all age groups (Lee K W, et al., Curr Probl Cardiol 2008; 33:467-546). The most common SVTs include atrioventricular nodal re-entrant tachycardia, atrioventricular re-entrant tachycardia and atrial tachycardia. SVT increases patient morbidity, particularly when symptoms are frequent or incessant, and in a small cohort of patients with atrial fibrillation (AF) and ventricular pre-excitation, it can be life-threatening.

[2799] Atrial fibrillation (AF) is the most common type of cardiac arrhythmia. The prevalence of AF increases as the population ages (Dang D, et al. J Natl Med Assoc 2002; 94:1036-48). In AF, the upper chambers of the heart do not function correctly as a result of abnormal electrical signalling (Falk R H. N Engl J Med 2001; 344:1067-78.). It can be characterized by rapid and irregular atrial depolarisations with a discrete lack of P waves on electrocardiograms. As a result, the blood in the atria remains static and can promote blood clot formation and increase the risk of stroke (Copley D J, et al. AACN Adv Crit Care 2016; 27:120-8.). This can cause detrimental symptoms, impair functional status and reduce the quality of life.

[2800] Angina represents the most common symptom of ischaemic heart disease, which is a major cause of death and disability worldwide. Nearly 10 million US adults experience stable angina, which occurs when myocardial oxygen supply does not meet demand, resulting in myocardial ischemia. Stable angina is associated with an average annual risk of 3% to 4% for myocardial infarction or death.

[2801] Hypertrophic cardiomyopathy is another common heart disorder, usually genetic in origin, that may affect up to 600,000 people in the United States. The disorder, which is characterized by left ventricular hypertrophy, is usually not progressive, but a small subset of patients develop serious complications, such as progressive heart failure, atrial fibrillation, and sudden cardiac death.

[2802] Anti-arrhythmic drug therapies, such as calcium channel blockers, are commonly used to treat heart disorders, such as SVT, AFIB, angina and HOCM, by regulating heart function through shaping the action potential and maintaining the rhythm of cardiac contraction.

[2803] In particular, calcium channels, such as CACNA1C, play an important role in regulating heart function. CACNA1C encodes for the α-subunit of the CaV1.2 L-type calcium channel (LTCC), which is critical for the plateau phase of the cardiac action potential, cellular excitability, excitation-contraction coupling, and regulation of gene expression. The currently available calcium channel blockers (e.g., dihydropyridines, phenylalkylamines, and benzothiazepines) all act by binding to different sites on CACNA1C and blocking the calcium current.

[2804] The CACNA1C calcium channels open and close at specific times to control the flow of calcium ions into cardiomyocytes at each heartbeat. How long the channels are open and closed is regulated to maintain normal heart function. Perturbations of CACNA1C change the structure of calcium channels throughout the body and have been associated with several different cardiac arrhythmia disorders. The altered channels stay open much longer than usual, which allows calcium ions to continue flowing into cells abnormally. The resulting overload of calcium ions within cardiac muscle cells changes the way the heart beats and can cause abnormal heart muscle contraction and arrhythmia.

[2805] Increased susceptibility for arrhythmia was observed in patients with gain of function CACNA1C variants under certain conditions (PLoS One. 2014; 9(9): e106982; Splawski I, et al. Cell. 2004 Oct. 1; 119(1):19-31). Specifically, gain of function mutations of CACNA1C revealed a marked reduction in voltage-dependent inactivation. The consequent increase in calcium influx prolongs the cardiac action potential, and thus the QT interval, and can generate early afterdepolarizations capable of triggering cardiac arrhythmias, such as supraventricular tachycardia and atrial fibrillation. Other CACNA1C variants were also shown to be associated with hypertrophic cardiomyopathy, congenital heart defects, and sudden cardiac death.

### Targeting CACNA1G for the Prevention and or Treatment of SVT and or Angina

[2806] Supraventricular tachycardia (SVT) is a heterogeneous category of cardiac arrhythmias characterized by a fast or tachycardiac rhythm that originates above the atrioventricular (AV) node. The prevalence of SVT is 2.25/1000 persons with a female predominance of 2:1 across all age groups (Lee K W, et al., Curr Probl Cardiol 2008; 33:467-546). The most common SVTs include atrioventricular nodal re-entrant tachycardia, atrioventricular re-entrant tachycardia and atrial tachycardia. SVT increases patient morbidity, particularly when symptoms are frequent or incessant, and in a small cohort of patients with atrial fibrillation (AF) and ventricular pre-excitation, it can be life-threatening.

[2807] Angina represents the most common symptom of ischaemic heart disease, which is a major cause of death and disability worldwide. Nearly 10 million US adults experience stable angina, which occurs when myocardial oxygen supply does not meet demand, resulting in myocardial ischemia. Stable angina is associated with an average annual risk of 3% to 4% for myocardial infarction or death.

[2808] Anti-arrhythmic drug therapies, such as calcium channel blockers, are commonly used to treat heart diseases such as SVT and angina by regulating adult heart function through shaping the action potential and maintaining the rhythm of cardiac contraction.

[2809] CACNA1G encodes for the subunit of the CaV3,1 T-type calcium channel, which plays a role in the human sinoatrial node and the conduction system. These channels contribute to the heartbeat by influencing pacemaking and the atrioventricular node. Inactivation of CACNA1G significantly slowed the intrinsic in vivo heart rate, prolonged the sinoatrial node recovery time, and slowed pacemaker activity of individual sinoatrial node cells through a reduction of the slope of the diastolic depolarization (Mangoni, et al., Circulation Research 2006, 1422-1430). Thus, selective blockers of CaV3.1 channels hold promise for the therapeutic management of the cardiac diseases that require moderate heart rate reduction, such as SVT. The T-type calcium channels also constitute a promising pharmacological target for the treatment of human diseases, such as epilepsy and chronic pain (Birch P J, et al. Drug Discov Today. 2004; 9:410-418).

### Targeting AGTR1 for the Prevention and or Treatment of HOCM, HCM, and or HFpEF

[2810] Hypertrophic cardiomyopathy (HCM) is the most common inheritable cardiac disorder with a phenotypic prevalence of 1:500. It is defined by the presence of left ventricular hypertrophy (LVH) in the absence of loading conditions (hypertension, valve disease) sufficient to cause the observed abnormality.

[2811] The obstructive HCM (hypertrophic obstructive cardiomyopathy or HOCM) is subtype of HCM. In HOCM, the wall (septum) between the bottom chambers of the heart thickens. The walls of the pumping chamber can also become stiff. The thickened septum may cause a narrowing that can block or reduce the blood flow from the left ventricle to the aorta, which is a condition called “outflow tract obstruction.”

[2812] Increased blood pressure causes a concentric pattern of LVH, which may progress to ventricular dilation and heart failure with preserved ejection fraction (HFpEF). Heart failure with preserved ejection fraction (HFpEF) is a clinical syndrome in which patients have symptoms and signs of heart failure as the result of high ventricular filling pressure despite normal or near normal left ventricular ejection fraction (LVEF≥50 percent). At a cellular level, cardiac myocytes in patients with HFpEF are thicker and shorter than normal myocytes, and collagen content is increased. At the organ level, affected individuals may have concentric remodeling with or without hypertrophy. Increases in myocyte stiffness are mediated in part by relative hypophosphorylation of the sarcomeric molecule titin, due to cyclic guanosine monophosphate (cGMP) deficiency thought to arise primarily as a consequence of increased nitroso-oxidative stress induced by comorbid conditions such as obesity, metabolic syndrome and aging. Cellular and tissue characteristics may become more pronounced as the disease progresses.

[2813] Genetic variants in the renin-angiotensin-aldosterone system (RAAS) are considered candidates for these modifying effects. The RAAS system contributes to LVH through effects mediated by circulating angiotensin as well as local activation of RAAS in the myocardium.

[2814] Angiotensin (Ang) I, produced from angiotensinogen (AGT), is converted to Ang II predominantly by angiotensin-converting enzyme (ACE) and possibly by chymase 1 (CMA1). Ang II binds primarily to the Ang II type 1 receptor (AGTR1) to promote cell growth and hypertrophy. It also stimulates aldosterone by aldosterone synthase (CYP11B2) synthesis, thereby increasing the release of aldosterone, which promotes fluid retention and cardiac fibrosis.

[2815] Previous studies suggested a role for specific genetic variants in genes encoding components of the RAAS pathway in modulation of the severity of LVH in patients with HCM (Orenes-Pifiero E, et al. J Renin Angiotensin Aldosterone Syst 2011; 12: 521-530; Ortlepp J R, et al., Heart 2002; 87: 270-275). In particular, a specific A>C polymorphism of the AGTR1 gene was considered as the pro-LVH allele. Carriers that harbor the pro-LVH allele had greater left ventricular muscle mass and interventricular septum thickness compared to those without the pro-LVH allele (Kolder et al. Eur J Hum Genet. 2012 October; 20(10): 1071-1077). Additional studies further demonstrated that left ventricular mass is associated with the AGTR1 polymorphism, and cardiac hypertrophy was improved by down-regulating AGTR1 (Y. Yang, et al. Exp. Ther. Med., 12 (3) (2016), pp. 1556-1562).

### Targeting SCN2A for the Prevention and or Treatment of AFIB.

[2816] Atrial fibrillation (AF) is the most common type of cardiac arrhythmia. The prevalence of AF increases as the population ages (Dang D, et al. J Natl Med Assoc 2002; 94:1036-48). In AF, the upper chambers of the heart do not function correctly as a result of abnormal electrical signalling (Falk R H. N Engl J Med 2001; 344:1067-78.). It can be characterized by rapid and irregular atrial depolarisations with a discrete lack of P waves on electrocardiograms. As a result, the blood in the atria remains static and can promote blood clot formation and increase the risk of stroke (Copley D J, et al. AACN Adv Crit Care 2016; 27:120-8.). This can cause detrimental symptoms, impair functional status and reduce the quality of life.

[2817] Atrial fibrillation can cause syncope or a temporary loss of consciousness caused by a fall in blood pressure. There is also a possibility of atrial fibrillation developing secondary to an epileptic seizure in cases of atrial fibrillation and transient loss of consciousness. Epileptic seizures are often associated with changes in cardiac autonomic function.

[2818] Sodium voltage-gated channel alpha subunit 2 (SCN2A) is one of the genes most commonly associated with early-onset epilepsy, and has recently been linked to autism spectrum disorder and developmental delay. SCN2A encodes the Nav1.2 subunit of voltage-gated sodium channel in neurons, which is important for action potential initiation and conduction. SCN2A gain-of-function mutations have been identified, and the phenotypes range from benign neonatal or infantile seizures to severe epileptic encephalopathy. SCN2A gene deletion acts as protective genetic modifier of sudden unexpected death in epilepsy (SUDEP) and suggest measures of brain-heart association as potential indices of SUDEP susceptibility (V Mishra et al., Hum Mol Genet. 2017 Jun. 1; 26(11):2091-2103). In addition to epilepsy and developmental delays, other manifestations of SCN2A deletion can include movement disorders such as dystonia, abnormal gait, ADHD, autism, dysautonomia (i.e. problems with heart rate, blood pressure, and temperature regulation), and GI problems such as feeding difficulties or reflux.

### Targeting HCN1 for the Prevention and or Treatment of AFIB; Treatment, e.g., Rate Control, in HOCM

[2819] Atrial fibrillation (AF) is the most common type of cardiac arrhythmia. The prevalence of AF increases as the population ages (Dang D, et al. J Natl Med Assoc 2002; 94:1036-48). In AF, the upper chambers of the heart do not function correctly as a result of abnormal electrical signalling (Falk R H. N Engl J Med 2001; 344:1067-78.). It can be characterized by rapid and irregular atrial depolarisations with a discrete lack of P waves on electrocardiograms. As a result, the blood in the atria remains static and can promote blood clot formation and increase the risk of stroke (Copley D J, et al. AACN Adv Crit Care 2016; 27:120-8.). This can cause detrimental symptoms, impair functional status and reduce the quality of life.

[2820] Hypertrophic cardiomyopathy is another common heart disorder, usually genetic in origin, that may affect up to 600,000 people in the United States. The disorder, which is characterized by left ventricular hypertrophy, is usually not progressive, but a small subset of patients develop serious complications, such as progressive heart failure, atrial fibrillation, and sudden cardiac death.

[2821] Hyperpolarization-activated cyclic nucleotide-gated (HCN) channels are voltage-gated channels encoded by the HCN1-4 gene family. These channels are primarily expressed in the heart and in the central and peripheral nervous systems. HCN channels conduct K+ and Na+ ions at a ratio of 3:1 to 5:1. They are activated by hyperpolarization of membrane voltage to −50 mV or below, and conduct the hyperpolarization-activated current, termed I_{f} in heart. In the sino-atrial node (SAN), I_{f} plays an essential role in setting the heart rate and mediating its autonomic control.

[2822] HCN1 is highly expressed in the SAN and, in addition, non-pacemaking atrial and ventricular cardiomyocytes also express HCN channels, with an increase in I_{f} activity in ventricular myocytes reported in hypertrophy, ischemic cardiomyopathy and heart failure due to re-expression of HCN genes. Studies have shown that I_{f} current density and occurrence is significantly greater in hypertrophic cardiomyocytes and end-stage failing hearts and this is directly related to the arrhythmias

[2823] Genetic variants in HCN channels are linked to sinus node dysfunction, atrial fibrillation, ventricular tachycardia, atrio-ventricular block, Brugada syndrome, sudden infant death syndrome, and sudden unexpected death in epilepsy. HCN1 deficient mice display congenital sinus node dysfunction with severely reduced cardiac output.

[2824] Several HCN channel blockers including ZD7288, zatebradine, cilobradine and ivabradine are available. The first clinically approved substance from this new class of drugs is ivabradine.

### Targeting HCN4 for the Prevention and or Treatment of AFIB; Treatment, e.g., Rate Control, in HOCM.

[2825] Atrial fibrillation (AF) is the most common type of cardiac arrhythmia. The prevalence of AF increases as the population ages (Dang D, et al. J Natl Med Assoc 2002; 94:1036-48). In AF, the upper chambers of the heart do not function correctly as a result of abnormal electrical signalling (Falk R H. N Engl J Med 2001; 344:1067-78.). It can be characterized by rapid and irregular atrial depolarisations with a discrete lack of P waves on electrocardiograms. As a result, the blood in the atria remains static and can promote blood clot formation and increase the risk of stroke (Copley D J, et al. AACN Adv Crit Care 2016; 27:120-8.). This can cause detrimental symptoms, impair functional status and reduce the quality of life.

[2826] Hypertrophic cardiomyopathy is another common heart disorder, usually genetic in origin, that may affect up to 600,000 people in the United States. The disorder, which is characterized by left ventricular hypertrophy, is usually not progressive, but a small subset of patients develop serious complications, such as progressive heart failure, atrial fibrillation, and sudden cardiac death.

[2827] Hyperpolarization-activated cyclic nucleotide-gated (HCN) channels are voltage-gated channels encoded by the HCN1-4 gene family. These channels are primarily expressed in the heart and in the central and peripheral nervous systems. HCN channels conduct K+ and Na+ ions at a ratio of 3:1 to 5:1. They are activated by hyperpolarization of membrane voltage to −50 mV or below, and conduct the hyperpolarization-activated current, termed I_{f} in heart. In the sino-atrial node (SAN), I_{f} plays an essential role in setting the heart rate and mediating its autonomic control.

[2828] HCN4 constitutes the predominant isoform in the sino-atrial node (SAN) at both transcript and protein level.

[2829] Gain of function variants in HCN4 have been shown to cause rhythm abnormalities, including symptomatic or asymptomatic bradycardia ventricular premature beats, tachycardia-bradycardia syndrome and atrial fibrillation (AF), complete atrioventricular (AV) block, long QT syndrome (LQTS) and torsades de pointes.

[2830] Drugs that specifically block HCN channels, e.g., ivabradine, slow the diastolic depolarisation of pacemaker cells, hence cardiac rate, with limited adverse cardiovascular side effects. Selective and quantitatively controlled slowing of heart rate provides an important therapeutic advantage in a variety of cardiac conditions.

### Targeting HCN3 for the Prevention and or Treatment of AFIB; Treatment, e.g., Rate Control, in HOCM.

[2831] Atrial fibrillation (AF) is the most common type of cardiac arrhythmia. The prevalence of AF increases as the population ages (Dang D, et al. J Natl Med Assoc 2002; 94:1036-48). In AF, the upper chambers of the heart do not function correctly as a result of abnormal electrical signalling (Falk R H. N Engl J Med 2001; 344:1067-78.). It can be characterized by rapid and irregular atrial depolarisations with a discrete lack of P waves on electrocardiograms. As a result, the blood in the atria remains static and can promote blood clot formation and increase the risk of stroke (Copley D J, et al. AACN Adv Crit Care 2016; 27:120-8.). This can cause detrimental symptoms, impair functional status and reduce the quality of life.

[2832] Hypertrophic cardiomyopathy is another common heart disorder, usually genetic in origin, that may affect up to 600,000 people in the United States. The disorder, which is characterized by left ventricular hypertrophy, is usually not progressive, but a small subset of patients develop serious complications, such as progressive heart failure, atrial fibrillation, and sudden cardiac death.

[2833] Hyperpolarization-activated cyclic nucleotide-gated (HCN) channels are voltage-gated channels encoded by the HCN1-4 gene family. These channels are primarily expressed in the heart and in the central and peripheral nervous systems. HCN channels conduct K+ and Na+ ions at a ratio of 3:1 to 5:1. They are activated by hyperpolarization of membrane voltage to −50 mV or below, and conduct the hyperpolarization-activated current, termed I_{f} in heart. In the sino-atrial node (SAN), I_{f} plays an essential role in setting the heart rate and mediating its autonomic control.

[2834] Although the cardiac expression of HCN3 channels is low, a ventricular phenotype caused by global deletion of HCN3 has been described. Epicardial myocytes of HCN3 knockouts displayed a reduction of I_{f} density by about 30% and a shortening of action potential duration caused by changes during the late repolarization phase. ECG recordings displayed a slight prolongation of the QT interval combined with increased T-wave amplitudes. These alterations were present only at low heart rates.

[2835] Thus, HCN3 contributes to the resting membrane potential and acts as a functional antagonist of hyperpolarizing K currents in late repolarization. Lack of this activity leads to a shortening of action potential duration.

### Targeting KCNA5 for the Prevention and or Treatment of AFIB, e.g., AFIB in Congestive Heart Failure (CHF).

[2836] Atrial fibrillation (AF) is the most common cardiac rhythm disorder in clinical practice. During the lifetime of men and women aged ≥40 years, there is about 25% risk for the development of AF. This arrhythmia may result in irregular ventricular response, tachycardia-mediated cardiomyopathy, heart failure and thromboembolism. AF accounts for nearly one-third of strokes in individuals above 65 years of age, and is also an independent predictor of mortality. AF is often associated with structural heart diseases or systemic disorders, such as hypertension, coronary artery disease, heart failure, rheumatic heart disease, hyperthyroidism and cardiomyopathies. However, in nearly 10-20% of cases, the underlying etiology for AF cannot be identified by routine examination, and such AF is termed ‘idiopathic’.

[2837] Heart failure (HF), including CHF and HF-pEF, affects an estimated 30-50 million patients worldwide. Despite recent therapeutic advances, its prevalence is increasing, partly due to a fall in mortality, but also from higher rates of major co-morbidities such as obesity, diabetes, and age. A major factor underlying cardiac dysfunction in HF resides in second messenger signaling defects coupled to 3′,5′-cyclic adenosine and guanosine monophosphate (cAMP, cGMP). Cyclic AMP stimulates protein kinase A (PKA) and exchange protein activated by cAMP (EPAC), acutely enhancing excitation-contraction coupling and sarcomere function. Cyclic GMP acts as a brake on this signaling by activating protein kinase G (PKG). Both cyclic-nucleotides have relevant vascular and fibroblast activity, reducing vessel tone, altering permeability and proliferation, and suppressing fibrosis. They are synthesized by adenylyl or guanylyl cyclases and degraded (hydrolyzed) by phosphodiesterases (PDEs), to provide tissue and cell specific intracellular nano-regulation.

[2838] K+ channels are members of a large family of transmembrane proteins that allow K+ to cross biological membranes selectively. Like Ca2+ and Na+ channels, voltage-gated K+ channels undergo conformational changes to open and close a gate in response to membrane depolarization. The K+ channel family is formed by a complex and diverse group of proteins that is known to exist in all three domains of organisms, eubacteria, archaebacteria, and eukaryotes. K+ channels have a wide range of functions that includes setting the resting membrane potential, modulating electrical excitability, and regulating cell volume.

[2839] Cardiac potassium channels maintain the rhythmicity of the heartbeat by repolarizing cardiomyocytes such that the electrical and contractile machineries stay in sync. They alternate between opened and closed conformations in response to the voltage difference across the membrane and form functional homotetrameric channels and heterotetrameric channels that contain variable proportions of KCNA1, KCNA2, KCNA4, KCNA5, and possibly other family members as well.

[2840] Dominant-negative mutations in KCNA5 have been demonstrated to fail to generate the ultrarapid delayed rectifier current vital for atrial repolarization and exerted an effect on wild-type current.

### KCNJ3 for the Prevention and or Treatment of AFIB.

[2841] As the population ages globally, atrial fibrillation (AF or AFIB) is predicted to affect 6-12 million people in the USA by 2050 and 17.9 million in Europe by 2060. Subjects with atrial fibrillation are 5 to 7 times more likely to have a stroke than the general population. Clots can also travel to other parts of the body (kidneys, heart, intestines), and cause other damage. Atrial fibrillation can also decrease the heart's pumping ability. The irregularity can make the heart work less efficiently. In addition, atrial fibrillation that occurs over a long period of time can significantly weaken the heart and lead to heart failure.

[2842] Sinus node cells, located in the right atrium, spontaneously produce an electric impulse (i.e., action potential) that propagates along the cardiac conduction system and causes contraction of the heart muscle. Thus, heart rate is precisely regulated within the proper range by both intrinsic and extrinsic mechanisms. The acetylcholine-activated potassium channel (I_{KACh} channel) expressed in the sinus node, atrium, and atrioventricular node contributes to heart rate slowing triggered by the parasympathetic nervous system. The IKACh channel is a heterotetramer of 2 inwardly rectifying potassium channel proteins, Kir3.1 and Kir3.4, encoded by the genes KCNJ3 and KCNJ5, respectively. As indicated above, KCNJ5 mutation has been associated with atrial fibrillation (AF). However, the molecular basis of IKACh channel pathology remains poorly understood and, to date, rare mutations showing a large effect have not been reported for cardiac diseases.

[2843] Autosomal dominant mutations in KCNJ3 have been associated with symptomatic sinus bradycardia, and chronic AF with slow ventricular response. Because I_{KACh} channels are expressed more abundantly in the atrium than in the ventricle, the blockage of IKACh is a target for atrial-selective AF therapy with a lower risk of ventricular arrhythmia.

### Targeting KCNJ4 for the Prevention and or Treatment of AFIB

[2844] As the population ages globally, atrial fibrillation (AF or AFIB) is predicted to affect 6-12 million people in the USA by 2050 and 17.9 million in Europe by 2060. Subjects with atrial fibrillation are 5 to 7 times more likely to have a stroke than the general population. Clots can also travel to other parts of the body (kidneys, heart, intestines), and cause other damage. Atrial fibrillation can also decrease the heart's pumping ability. The irregularity can make the heart work less efficiently. In addition, atrial fibrillation that occurs over a long period of time can significantly weaken the heart and lead to heart failure.

[2845] Potassium channels, such as KCNJ4, play an important role in regulating adult heart function through shaping the action potential and maintaining the rhythm of cardiac contraction.

[2846] KCNJ4 has been identified as a target for antiarrhythmic drugs, as it is expressed at ˜10-fold greater levels in the atria relative to the ventricles of animal model and expression of KCNJ4 Has been shown to be upregulated in left atrial appendage tissues from subjects having AFIB. In addition, gain-of-function mutations of KCNJ4 have been associated with familial forms of AF, and KCNJ4 upregulation contributes to the stabilization/perpetuation of AFIB.

### Targeting PLN for the Prevention and or Treatment of HF-rEF, Arrhythmia, and or Cardiomyopathy

[2847] Heart failure, such as heart failure with reduced ejection fraction (HF-rEF), is a major cause of death and disability. The hallmarks of heart failure are impaired cardiac contraction and relaxation accompanied by abnormalities in calcium handling and 0-adrenergic signaling (Lou, Q, et al. Adv Exp Med Biol. 2012; 740:1145-1174). In cardiomyocytes, cytosolic calcium regulates cardiac contraction and relaxation by an excitation-contraction coupling mechanism. The Ca2+ influx via L-type calcium channels elicits Ca2+-induced Ca2+ release from sarco(endo)plasmic reticulum (SR) through ryanodine receptors, and increased cytosolic Ca2+ leads to cardiac contraction. The sequestration of Ca2+ from the cytosol into the SR, which determines active relaxation, is caused by a calcium pump on the SR called SR Ca2+ ATPase (SERCA2a), the activity of which is regulated by a small phosphoprotein, phospholamban (PLN) (Kranias, E G, et al., Circ Res. 2012; 110(12):1646-1660).

[2848] In physiological conditions, β-adrenergic receptor (PAR) stimulation enhances myocyte contraction by activating cyclic adenosine monophosphate-dependent kinase (protein kinase A [PKA]), which phosphorylates multiple Ca2+ cycling proteins, including PLN. Phospholamban inhibits SERCA2a activity through protein-protein interaction. Phosphorylation of PLN by PKA alters its interaction with SERCA2a to activate Ca2+ reuptake to the SR, resulting in enhanced SR Ca2+ loading and Ca2+ cycling. In the failing myocyte, dysfunctional PAR signaling leads to less PKA activation and activation of alternate pathways, such as calcium/calmodulin-dependent kinase II signaling to cause pathological hypertrophy. Consequently, the usefulness of positive inotropic agents in HF is strongly limited, and direct activation of Ca2+ cycling, which can circumvent dysfunctional PAR activity, is required. Thus, inhibition of PLN is one of the most promising strategies in this context. Several reports have demonstrated that PLN inhibition alleviates cardiac failure in various animal models of cardiac pathologies, including myocardial infarction in rats, genetic cardiomyopathy in hamsters, and dilated cardiomyopathy in mice (Iwanaga, Y, et al., J Clin Invest. 2004; 113(5):727-736; Hoshijima, M, et al., Nat Med. 2002; 8(8):864-871; Minamisawa, S. et al., Cell. 1999; 99(3):313-322). In addition, modulation of PLN improves contractility in human cardiomyocytes from patients with advanced HF (del Monte, F, et al. Circulation. 2002; 105(8):904-907), suggesting that targeting PLN is a bona fide therapy for failing hearts.

[2849] In particular, the ablation of PLN in mice prevents SERCA2a inhibition and enhances cardiac contractility by increasing the SR Ca2+ store. The ablation of PLN also reverses heart failure in some cardiomyopathic animal models, indicating the possibility of therapeutic approaches. The overexpression of PLN in mouse heart depresses cardiac function and proves that only ˜40% of SERCA pumps are normally regulated by PLN in mouse heart. The superinhibition of SERCA by specific PLN mutants impairs cardiac function and leads to cardiac remodelling and early death if the effects of the mutation cannot be reversed by β-agonists. In human and animal models of heart failure, the PLN-SERCA inhibited complex increases. Interventions that diminish the PLN-SERCA complex have been beneficial in some mouse models of heart failure (MacLennan and Kranias. 2003. Nat Rev Mol Cell Biol 4:566-77).

[2850] Dilated cardiomyopathy (DCM) is the second most common cause of heart failure with reduced ejection fraction (HFrEF) after coronary artery disease. It has been estimated that up to 40% of DCM cases have a genetic cause. The p.(Arg14del) pathogenic variant of the PLN gene (PLN-R¹⁴del) is a Dutch founder mutation with a high prevalence in DCM and arrhythmogenic cardiomyopathy (ACM) patients. Cardiomyopathy caused by the p.(Arg14del) pathogenic variant of the PLN gene is characterized by intracardiomyocyte PLN aggregation and can lead to severe DCM. Depletion of PLN attenuated heart failure in several cardiomyopathy models. Specifically, PLN knockdown was shown to reduce protein aggregation, normalize autophagy markers, improve cardiomyopathy and survival (Eijgenraam et al. 2022. Int J Mol Sci 23:2427. 4). PLN knockdown also reversed the heart failure phenotype in a genetic dilated cardiomyopathy mouse model, and prevented progression of left ventricular dilatation and improved left ventricular contractility in rats with myocardial infarction (Grote Beverborg et al. 2021. Nat Comm 12:5180). PLN ablation was also shown to reduce susceptibility to ventricular arrhythmias in mouse model of catecholaminergic polymorphic ventricular tachycardia (Mazzocchi et al. 2016. J Physiol 594: 3005-3030).

[2851] Thus, inhibition of PLN is an effective strategy in treating and/or preventing genetic cardiomyopathy, arrhythmia, as well as heart failure, in particular HF with reduced ejection fraction (HF-rEF).

### Targeting CAMK2D for the Prevention and or Treatment of Heart Failure and or AFIB

[2852] CAMK2D has been shown to associate with the development of cardiac disease, such as heart failure, and arrhythmias (Maier and Bers, 2002, J. Mol. Cell. Cardiol. 34, 919-939; Swaminathan et al., 2012, Circ. Res. 110, 1661-1677). Animal models have shown proof-of-concept studies that transgenic overexpression of CAMK2D is sufficient to induce structural and electrical remodeling in the heart, leading to compromised contractility and increased risk for sudden cardiac death (Zhang et al., 2002, J. Biol. Chem. 277, 1261-1267; Wagner et al., 2011, Circ. Res. 108, 555-565). Likewise, genetic and chemical inhibition of CAMK2D has been shown to confer protection from the development of dilated cardiomyopathy and sustained contractile performance, following both pressure overload and ischemic stress (Backs et al., 2009, J Clin. Invest. 116, 1853-1864.; Ling et al., 2009, J. Clin. Invest. 119, 1230-1240.). Human heart failure has also been associated with an increased expression/activity of CAMK2D (Hoch et al., 1999, Circ. Res. 84, 713-721). The central role for CAMK2D in development of disease stems from its regulation of proteins involved in critical cell functions such Ca2+ cycling. CAMK2D has been implicated in pathologic phosphorylation of a number of Ca2+ handling proteins including phospholamban, leading to activation of the sarcoplasmic reticulum (SR) ATP-driven Ca2+ pump SERCA2a (Mattiazzi and Kranias, 2014, Front. Pharmacol. 5, 5.); the ryanodine receptor SR Ca2+ release channel (RyR2) (Witcher et al., 1991, J. Biol. Chem. 266, 11144-11152), promoting increased channel open probability and SR Ca2+ leak; and the L-type Ca2+ channel Cav1.2 and associated β-subunits, potentiating current amplitude and slowing inactivation (Hudmon et al., 2005, J. Cell Biol. 171, 537-547). Collectively, these events not only promote activation of hypertrophic remodeling cascades but also heighten the risk for inappropriate membrane potential depolarizations (afterdepolarizations) that serve as arrhythmia triggers (Wu et al., 2002, Circulation 106, 1288-1293).

[2853] In addition to association with heart failure, CAMK2D has also been found to be a GWAS locus for atrial fibrillation (Roselli C et al. 2018. Nat Genet; 50:1225-1233; Ramirez J et al. 2020. Am J Hum Genet 106:764-78). Pathological activation of CAMK2D promotes arrhythmia and heart failure (Veitch C R et al. 2021 Front Pharmacol 12: 695401; Nassal D et al. 2020. Front Pharmacol 11:35). In humans, CAMK2D levels and activity are increased in atrial fibrillation and heart failure. In animal models, sustained CAMK2D activation induces adverse structural and electrical remodeling of the heart via phosphorylation of target proteins. Pharmacological and genetic inhibition were shown to prevent these changes. Transgenic expression in the atria of a CAMK2D inhibitory peptide was shown to prevent adverse atrial structure and electrical remodeling (Liu Z et al. 2019. Heart Rhythm 16:1080-1088). In addition, CAMK2D knockout protects against pathological cardiac hypertrophy in a mouse model of heart failure (Backs J et al. PNAS 2009; 106:7:2342-2347).

[2854] Thus, suppressing CAMK2D expression is an effective strategy in treating and/or preventing heart failure and/or atrial fibrillation.

### Targeting PDE1 for the Prevention and or Treatment of CHF and or HF-pEF

[2855] Heart failure (HF), including CHF and HF-pEF, affects an estimated 30-50 million patients worldwide. Despite recent therapeutic advances, its prevalence is increasing, partly due to a fall in mortality, but also from higher rates of major co-morbidities such as obesity, diabetes, and age. A major factor underlying cardiac dysfunction in HF resides in second messenger signaling defects coupled to 3′,5′-cyclic adenosine and guanosine monophosphate (cAMP, cGMP). Cyclic AMP stimulates protein kinase A (PKA) and exchange protein activated by cAMP (EPAC), acutely enhancing excitation-contraction coupling and sarcomere function. Cyclic GMP acts as a brake on this signaling by activating protein kinase G (PKG). Both cyclic-nucleotides have relevant vascular and fibroblast activity, reducing vessel tone, altering permeability and proliferation, and suppressing fibrosis. They are synthesized by adenylyl or guanylyl cyclases and degraded (hydrolyzed) by phosphodiesterases (PDEs), to provide tissue and cell specific intracellular nano-regulation.

[2856] PDE1 is constitutively and robustly expressed in the heart. It is activated by a Ca2+/calmodulin-binding domain and provides a substantial percent of in vitro cAMP and cGMP hydrolytic activity in mammals, including humans.

[2857] It has been shown that inhibition of PDE1 prevents phenylephrine-induced myocyte hypertrophy in neonatal and adult rat ventricular myocytes reduces angiotensin II or TGF-induced activation of rat cardiac fibroblasts, and attenuates isoproterenol-induced interstitial fibrosis in mice. Cellular senescence in vascular smooth muscle myocytes leads to elevated PDE1 expression, and PDE1 inhibition restores vasodilatory responses to sodium nitroprusside in aging mice. PDE1 expression in vascular smooth muscle cells in vitro increases with the transition from the contractile to the synthetic phenotype, and PDE1 inhibition attenuates proliferation and migration of vascular smooth muscle cells in culture. PDE1 expression is increased in mouse vascular injury models in vivo and in neointimal smooth muscle cells of human coronary arteries, and injury-induced neointimal formation is reduced by PDE1 inhibition in coronary arteries of mice. Knockout of the PDE1C gene has antihypertrophic, antifibrotic, and antiapoptotic actions in mouse hearts. These observations suggest that PDE1 is a therapeutic target for cardiovascular disease. Indeed, recently a selective small molecule PDE1 inhibitor, ITI-214, was demonstrated to improve cardiac output by increasing heart contractility and decreasing vascular resistance in a Phase I/II study of heart failure patients.

### Targeting Myostatin for the Prevention and or Treatment of Myostatin-Related Muscle Dystrophy

[2858] Myostatin, also known as growth differentiation factor 8 (GDF8), is a negative regulator of muscle mass and a member of the TGF-β superfamily of proteins. Myostatin is initially synthesized by myocytes as a pre-promyostatin molecule composed of an N-terminal signal sequence (for secretion), an N-prodomain region (essential for proper folding of myostatin and subsequently proteolytically processed), and the biologically active C-terminal domain. The precursor pre-promyostatin must undergo proteolytic cleavage to form the biologically active myostatin molecule, which exists as a disulfide-linked dimer of two C-terminal domains. The cleaved propeptide domain also plays a regulatory role through non-covalent binding to the active myostatin C-terminal domain to form an inactive latent myostatin complex. Myostatin is also capable of effecting a non-canonical signaling cascade involving the cellular energy-sensing enzyme AMP-activated kinase (AMPK) and a regulatory protein kinase transforming growth factor-β-activated kinase 1.

[2859] Genetic deletion of myostatin has been associated with increasing muscle mass in mice, cattle, dogs, horses, and other species, indicating its evolutionary conservation (McPherron A C, et al., Nature 1997; 387:8390). Discovery of a hypermuscular child who was homozygous for an splice site mutation, which resulted in a premature stop codon, suggested that inhibition of myostatin might confer therapeutic benefits for muscle wasting disease in humans (Schuelke M, et al. New Engl J Med 2004; 350:26822688).

[2860] Various myostatin inhibitors have been developed and evaluated as potential treatments for different types of muscular dystrophy. These inhibitors have been shown to ameliorate the phenotype of muscular dystrophy, e.g., by improving muscle mass and strength.

### Targeting CHRNA1, CHRNB1, CHRND, CHRNE and CHRNG for the Prevention and or Treatment of CMS

[2861] Congenital myasthenic syndromes (CMS) are a heterogeneous group of rare inherited neuromuscular disorders characterized by fatigable weakness of skeletal muscle owing to compromised function of the neuromuscular junction (NMJ). The phenotype is caused by failure of transmission across this synapse connecting the nerve with the muscle, whereby an incoming nerve stimulus does not consistently lead to muscle excitation and contraction. Neuromuscular transmission is mediated by the generation of an action potential causing the release of acetylcholine from the nerve terminal into the synaptic cleft, its binding to the acetylcholine receptor (AChR) with the opening of its ion channel and the enzymatic breakdown of acetylcholine by acetylcholinesterase (AChE). The AChR controls electrical signalling between nerve and muscle cells by opening and closing a gate, membrane-spanning pore to trigger muscle contraction. It has five subunits of four different types: two alpha and one each of beta, gamma (or epsilon), and delta subunits ((i.e., CHRNE, CHRNA1, CHRNB1, CHRND, and CHRNG). Mutations affecting subunits of the AChR pore cause CMS in humans.

[2862] Pathophysiological mechanisms acting on any part of this chain and resulting in a reduction in the amount of acetylcholine released, the impairment of the AChR, reduction in the number of receptors or defective breakdown of acetylcholine may lead to CMS. The majority of CMS types are caused by defects in the AChR itself, but they can also result from causative variants affecting presynaptic proteins or proteins associated with the synaptic basal lamina or variants causing defects in endplate development and maintenance or defects in protein glycosylation. Defective neuromuscular transmission presents clinically as fatigable weakness due to increasing impairment of transmission across the NMJ with repeated activation.

[2863] Generalized and fatigable skeletal muscle weakness is the most common clinical sign of CMS, but locus and allelic heterogeneity determine variable severity and additional symptoms. CMS can result from recessive missense, non-sense, or splice site and promoter region mutations in any of the AChR subunits, but most occur in the gamma (or epsilon) subunit.

[2864] Diagnosis of CMS is established with clinical and electrodiagnostic features and identification of a causative mutation. In some instances, a clinical diagnosis can be made without finding a causative gene (e.g., individuals who exhibit fatigable weakness, especially of ocular and other cranial muscles, at birth or early childhood). Clinical diagnosis may rely on history, clinical exams, blood tests, incremental or decremental responses or abnormal single-fiber EMG (SF-EMG) study results, lung function tests, polysomnography, the Tensilon test, and muscle biopsy. In rarer cases when symptoms manifest in adolescence or adulthood, symptom presentation may differ from that seen in infants and young children and can include proximal and axial muscle weakness associated with a decremental response requiring prolonged stimulation.

[2865] Mutations in about 32 genes that encode proteins involved in this signaling pathway are known to cause CMS. Eight proteins are associated with presynaptic CMS, four with synaptic CMS, fifteen with post-synaptic CMS, and five with glycosylation defects. Proteins affected in CMS have different functions, such as ion channels (AchR,), structural proteins (COL13A1, RAPSN), signalling molecules (LRP4, MUSK, DOK7), catalytic enzymes, sensor proteins, or transport proteins. Various gene mutations in presynaptic, synaptic, and postsynaptic proteins have been demonstrated in patients, with more than 50% of the mutations involving aberrations in postsynaptic AChR subunits (i.e., CHRNE, CHRNA1, CHRNB1, CHRND, and CHRNG). Mutations in RAPSN, COLQ, and DOK7 comprise another 35% to 50% of cases.

[2866] The CHRNA1 gene encodes the alpha-subunit of the nicotinergic, post-synaptic AchR. CHRNA1 mRNA undergoes alternative splicing and two splice variants (P3A− and P3A+) are produced. Mutations in CHRNA1 result in imbalance between the two splice variants with an increase in P3A+. CHRNA1 mutations reduce the number of AchR at the post-synaptic membrane. The pattern of inheritance is autosomal dominant if CHRNA1 mutations cause a slow channel CMS (SCCMS), or autosomal recessive in case of primary AchR-deficiency. The first CHRNA1-related CMS were reported in 2008. Patients presented already prenatally with growth retardation, reduced movements, edema, contractures, and postnatally with dysmorphism, muscle wasting, scoliosis, contractures, and pterygia. Antisense oligonucleotides (AONs) have been shown to restore the balance between the two splice variants and are thus expected to be beneficial in patients carrying such mutations.

[2867] The CHRNB1 gene encodes for the beta-subunit of the nicotinergic, post-synaptic acetylcholine receptor (AChR). Non-synonymous mutations in the human CHRNB1 gene encoding the cholinergic receptor nicotinic beta 1 subunit are known to cause dominant and recessive forms of CMS. The first mutations in CHRNB1 causing CMS were reported in a Brazilian study in 2008. The first patient published was a 28 year old male manifesting since birth with ptosis, ophthalmoparesis, dysphagia, proximal limb muscle weakness, scapular winging, weakness of axial muscles, wasting, and scoliosis. He showed a decremental response to RNS, had double discharges, and a myopathic EMG. The course was progressive but he benefitted from fluoxetine (Mihaylova V, et al. J Neurol Neurosurg Psychiatry. 2010; 81:973-977). The second patient carrying a CHRNB1 mutation was a 3wo male manifesting with ptosis, facial weakness, severe hypotonia, and respiratory insufficiency requiring assisted ventilation (Shen X M, et al., Hum Mutat. 2016; 37:1051-1059). The response to LF-RNS was decremental. In a Spanish study of a CMS cohort, a third patient with a CHRNB1 mutation was identified but no clinical details were provided (atera-de Benito D, et al., Neuromuscul Disord 2017. pii: S0960-8966(17)30475-3).

[2868] The CHRND gene encodes the delta-subunit of the nicotinergic, post-synaptic AchR. The first mutation in CHRND causing CMS was reported in a German patient with early-onset CMS manifesting with feeding difficulties, moderate, generalised weakness, and recurrent episodes of respiratory insufficiency provoked by infections (Müller J S, et al., Brain. 2006; 129:2784-2793). The second patient was a 20 year old female with moderate to severe myasthenic manifestations since birth (Shen X M, et al., J Clin Invest. 2008 May; 118(5):1867-76). She had a marked decremental response to LF-RNS. One of her siblings with a similar presentation had died at age 11 m. Two further patients were reported in a study of CMS patients from Israel but no clinical details were provided (Aharoni S, et al., Neuromuscul Disord. 2017 February; 27(2):136-140).

[2869] The CHRNE gene encodes for the epsilon-subunit of the AchR. The first mutation in the CHRNE gene causing a CMS has been reported already in 2000 (Sieb J P, et al., Hum Genet. 2000; 107:160-164). Since then various different types of mutations have been reported and it is estimated that up to half of the patients with a CMS carry a CHRNE mutation, thus representing the gene most frequently mutated in CMS. In a study of 64 CMS patients from Spain, CHRNE mutations were detected in 27% of the patients (Natera-de Benito D, et al., Neuromuscul Disord 2017. pii: S0960-8966(17)30475-3). In a study of 45 patients from 35 Israeli CMS families, CHRNE mutations were found in 7 kinships (Aharoni S, et al., Neuromuscul Disord. 2017 February; 27(2):136-140). In a study of 23 families with CMS from Maghreb countries, the founder mutation c.1293insG was found in 60% of these patients (Richard P, et al., Neurology. 2008 Dec. 9; 71(24):1967-72). Type and severity of clinical manifestations of CHRNE mutations may vary considerably between affected families. Some patients may present with only ptosis whereas others may present with severe generalised myasthenia. Most patients present at birth with mildly progressive bulbar, respiratory, or generalized limb weakness with ptosis or ophthalmoplegia. Single patients may die prematurely in infancy from respiratory failure. Some patients may have myasthenic symptoms since birth and achieve ambulation late or not at all. Single patients present with a fluctuating course. Single patients develop severe scoliosis. RNS may be decremental or may be normal. Single-fiber EMG (SF-EMG) may reveal an increased jitter. Some patients may show repetitive CMAPs. Most patients respond favourably to AchE inhibitors.

[2870] The CHRNG gene encodes for the fetal gamma-subunit of the AchR. Mutations in the CHRNG gene cause CMS with multiple ptyerygia (lethal multiple pterygia syndrome (LMPS) or the Escobar variant of multiple pterygia syndrome (EVMPS)) (Hoffmann K, et al., Am J Hum Genet. 2006; 79:303-312). In a study of seven families with Escobar syndrome (contractions, multiple pterygia, respiratory distress), mutations in the CHRNG gene were detected in 12 family members. The female to male ratio was 7:5. Some patients presented with decreased fetal movements, facial weakness, respiratory distress, arthrogryposis, short stature, kyphosis/scoliosis, dysmorphism, high-arched palate, cleft palate, arachnodactyly, or cryptorchism. None presented with myasthenic manifestations postnatally. CHRNG mutations may be also responsible for the allelic disease fetal akinesia deformation sequence (FADS). In a study of 46 CMS patients from Spain, five carried a mutation in the CHRNG gene (Natera-de Benito D, et al., Neuromuscul Disord 2017. pii: S0960-8966(17)30475-3). They all presented with arthrogryposis and delayed motor milestones, and some of them with poor sucking. Interestingly, none of them received drugs usually given for CMS. In a study of three Iranian CHRNG-related CMS patients, no drug treatment was applied. One of the patients presented with short neck, mild axillar pterygia, elbows and knees, joint contractures, clenched hands with thumbs held across palm and club feet (varus). The patient had rockerbottom feet, with almost no movement in ankles. Facial dysmorphism included hemangioma over forehead and nose, strabismus, flat nasal bridge, and downturned corners of mouth (Kariminejad A, et al., BMC Genet. 2016 May 31; 17(1):71).

[2871] Overall, CMS can result from missense, non-sense, or splice site and promoter region mutations in any of the AChR subunits, but most occur in the gamma (or epsilon) subunit. The high frequency of mutations in the epsilon subunit compared with other subunits has been attributed to phenotypic rescue by substitution of the fetal gamma subunit for the defective epsilon subunit (Ohno K, et al. Hum Mol Genet. 1997; 6:753-66). Individuals harboring null mutations in both alleles of CHRNA1, CHRNB1, or CHRND cannot survive because no substituting sub-units exist and hence these individuals probably die in utero (Engel A G, et al., Lancet Neurol. 2015; 14:420-34). Patients with heterozygous or homozygous low-expressor mutations in the non-epsilon subunit are severely affected have high mortality in infancy or early childhood. Thus, given the importance of AchR in CMS, manipulation of AchR subunits are expected to ameliorate the CMS phenotype in patients.

### Targeting COL13A1 for the Prevention and or Treatment of CMS

[2872] Mutations in gene encoding synaptic proteins can cause CMS. Collegan XIII is a non-fibrillar transmembrane collagen which has been long recognized for its critical role in synaptic maturation of the neuromuscular junction. The COL13A1 gene encodes the α-chain of collagen XIII with a single transmembrane domain. COL13A1 is localised to the NMJ, where it is responsible for clustering of the AchR during myotube differentiation. Unlike most of the collagens, COL13A1 is anchored to the plasma membrane by a hydrophobic transmembrane segment. The presence of a proprotease recognition site in the ectodomain allows the C-terminus to be proteolytically cleaved into a soluble form that is part of the basal lamina.

[2873] Mutations in this gene manifest clinically as CMS, which has been reported in three patients from two families (Logan C V, et al. Am J Hum Genet. 2015; 97:878-85). Two of these patients manifested with congenital respiratory insufficiency, bulbar weakness, or facial weakness. All three patients presented with feeding difficulties, ptosis, limb weakness, and dysmorphism. Two patients each presented with spinal stiffness or distal joint laxity, and one patient with ophthalmoparesis and cognitive impairment. Two showed a decremental response to RNS and two an increased jitter. Two required non-invasive positive pressure ventilation.

[2874] COL13A1 loss-of-function mutations were also identified in six additional CMS patients from three unrelated families (Dusl M. et al., Journal of Neurology, 2019; 255: 1107-1112). The phenotype of these cases was similar to the previously reported patients including respiratory distress and severe dysphagia at birth that often resolved or improved in the first days or weeks of life. All individuals had prominent eyelid ptosis with only minor ophthalmoparesis as well as generalized muscle weakness, predominantly affecting facial, bulbar, respiratory and axial muscles. Response to acetylcholinesterase inhibitor treatment was generally negative while salbutamol proved beneficial. These data further support the causality of COL13A1 variants for CMS and suggest that this type of CMS might be clinically homogenous and requires alternative pharmacological therapy.

### Targeting LRP4 for the Prevention and or Treatment of CMS

[2875] Some CMS are due to mutations in genes encoding post-synaptic proteins. Post-synaptic CMSs represent the vast majority of the CMS subtypes. Post-synaptic CMS are subdivided into primary AchR deficiency, kinetic abnormalities of the AChR, and defects within the AChR-clustering pathway. Mutations in LRP4 cause defects within the AChR-clustering pathway.

[2876] The LRP4 gene encodes for lipoprotein receptor-related protein 4, which functions as a receptor for agrin. Agrin, which is released from motor nerve terminals, binds to LRP4 in muscle, stimulating the formation of a complex between LRP4 and muscle-specific kinase (MUSK), a receptor tyrosine kinase that acts as a master regulator of synaptic differentiation. LRP4, once clustered in the postsynaptic membrane as a consequence of MUSK activation, also signals directly back to motor axons to stimulate presynaptic differentiation. Activated MUSK together with DOK7 stimulates rapsyn to concentrate and anchor AchR at the post-synaptic membrane and interacts with other proteins implicated in the assembly and maintenance of the NMJ. LRP4 is thus essential for pre- and post-synaptic specialisation of the NMJ.

[2877] The first mutation in the LRP4 gene causing CMS was reported in 2014. A newborn female presented with respiratory arrest and feeding difficulties, and required feeding and ventilator support until 6 m of age. Motor milestones were delayed and she developed easy fatigability with temporary wheelchair-dependency. At ages 9 and 14y she presented with ptosis, ophthalmoparesis, and limb weakness. RNS evoked a decremental response, which improved upon application of edrophonium. AchE inhibitors worsened the clinical manifestations. A second kinship harbouring LRP4 mutations was reported in 2015. The two sisters, aged 34 and 20y, presented with delayed motor milestones, slight chewing and swallowing difficulties, and later developed limb weakness. Albuterol was highly effective.

### Targeting MUSK for the Prevention and or Treatment of CMS

[2878] Mutations in MUSK cause defects within the AChR-clustering pathway. MUSK encodes for a protein that is involved in endplate maturation, maintenance of the endplate functions, proper functioning of rapsyn, and functioning of the AchR. MUSK forms a co-receptor for agrin with LRP4. Activation of MUSK by agrin and DOK7 results in the recruitment of several downstream kinases and phosphorylation of the AChR β-subunit, leading to the reorganization of the actin cytoskeleton and AChR clustering. The fundamental role of the MUSK-signaling pathway is supported by the fact that mice deficient in agrin, MUSK, rapsyn or Dok-7 lack postsynaptic differentiation and die at birth from respiratory failure.

[2879] CMS due to MUSK mutations manifests as respiratory insufficiency, neonatal ptosis, proximal limb muscle weakness, and weak bulbar, facial, or ocular muscles. A 30yo Chinese male with the LGMD-type of MUSK-related CMS developed mild atrophy of the leg muscles. LF-RNS was decremental. Pyridostigmin deteriorated the clinical manifestations. Another male infant manifested with congenital respiratory failure requiring mechanical ventilation, axial weakness with head drop, facial weakness, proximal limb weakness, and ophthalmoparesis. Salbutamol was effective but 3,4-DAP had only a mild effect, and AchE inhibitors worsened the phenotype. In a female with congenital hypotonia and respiratory distress requiring mechanical ventilation for 8 m, respiratory distress and nocturnal apnea with vocal cord paralysis recurred at age 8y. 3,4-DAP was effective. In two Turkish brothers MUSK mutations manifested as LGMD-type CMS. MUSK-related CMS may also manifest as congenital ptosis and later in life with fatigability. In another patient with MUSK-related CMS and congenital respiratory insufficiency, albuterol was moderately effective but AchE inhibitor, 3,4-DAP, and ephedrine were ineffective.

### Targeting RAPSN for the Prevention and or Treatment of CMS

[2880] Mutations in RAPSN cause defects within the AChR-clustering pathway. RAPSN encodes for rapsyn, a post-synaptic membrane protein that anchors the nicotinic AchR to the motor endplate and also binds to β-dystroglycan. Rapsyn is essential for clustering of the AchR at the post-synaptic membrane and required for the phosphorylation of CHRNB1. Mutant mice lacking rapsyn show absence of aggregation of AChRs and lack of accumulation of cytoskeletal proteins such as β-dystroglycan, and utrophin.

[2881] RAPSN mutations are a common cause of post-synaptic CMS. Humans with mutations in the RAPSN gene are affected with a postsynaptic form of CMS characterized by impairment of the morphologic development of the postsynaptic region. The severity of symptoms in this form of CMS is variable. The most common of the RAPSN mutation is N88G, and patients are either homozygous or heterozygous for the N88K mutation (Ohno K, et al., (2002) Am J Hum Genet 70(4):875-885).

[2882] Clinically, patients present with fluctuating ptosis, occasionally bulbar symptoms, neck muscle and mild proximal limb muscle weakness. Infections can precipitate exacerbation of clinical manifestations. In single patients prominent hyperlordosis can occur. Usually, the response to AchE inhibitor is favourable but can be improved by adding 3,4 DAP. Fluoxetine may worsen the decremental response in single patients. In some patients general anesthesia may exacerbate muscle weakness. The overall course is stable with intermittent worsenings.

### Targeting DOK7 for the Prevention and or Treatment of CMS

[2883] Mutations in DOK7 cause defects within the AChR-clustering pathway, and are responsible for about 10-20% of all cases of CMS. The DOK7 (downstream-of-kinase) gene encodes for the protein DOK7, which is involved in signaling downstream of receptor and non-receptor phosphotyrosine kinases. DOK7 is a cytoplasmic activator of muscle-specific receptor-tyrosine kinase (MuSK). Both DOK7 and MuSK are required for neuromuscular synaptogenesis. Mutations in DOK7 underlie a congenital myasthenic syndrome (CMS) associated with small and simplified neuromuscular synapses likely due to impaired DOK7/MuSK signaling. The overwhelming majority of patients with DOK7 CMS have at least one allele with a frameshift mutation that causes a truncation in the COOH-terminal region of DOK7 and affects MuSK activation.

[2884] Concerning the frequency of DOK7-related CMS, it was the second most frequent subtype in a Brasilian cohort. Clinical onset is characterised by gait disturbance due to muscle weakness after normal motor milestones. Proximal limb muscles are more strongly affected than distal limb muscles (LGMD-like pattern). Congenital DOK7-related CMS may manifest as stridor due to vocal cord paralysis, occasionally requiring intubation and artificial ventilation. Occasionally, patients present with ptosis but only rarely with ophthalmoparesis. Fatigability is often absent but prolonged periods of weakness may occur. Feeding difficulties may require nasogastral tube feeding or even PEG implantation. Muscle biopsy may show lipidosis and defective branching of terminal axons, which results in a unique terminal axon contacting en passant post-synaptic cups. AchE inhibitors are usually ineffective and may even worsen clinical manifestations. Ephedrine (initially 25 mg/d and increased to 75-100 mg/d) seems to be an effective alternative. Salbutamol may be effective in DOK7-related CMS as well. Single patients profit from albuterol, which can prevent progression of muscle weakness in LGMD-type DOK7-related CMS.

### Targeting SCN4A for the Prevention and or Treatment of CMS

[2885] Mutations in SCN4A cause defects within the AChR-clustering pathway. SCN4A encodes for a post-synaptic Nav1.4 voltage-gated sodium channel responsible for the initiation and propagation of the action potential in the muscle fibres that results in muscle contraction.

[2886] Several allelic disorders of skeletal muscle are caused by mutations of SCN4A. Missense mutations with gain-of-function changes (too much inward Na+ current) are found in hyperkalemic periodic paralysis (HyperPP), paramyotonia congenita, and several variants of sodium channel myotonia. Leaky channels resulting from mutations of arginine residues in the voltage sensor domain cause hypokalemic periodic paralysis (HypoPP) type 2. These traits are all dominantly inherited.

[2887] Loss-of-function (LOF) mutations of SCN4A are associated with recessively inherited phenotypes. A congenital myasthenic syndrome (CMS) has been associated with missense mutations of SCN4A that cause a LOF by markedly enhancing channel inactivation. More recently, congenital myopathy with neonatal hypotonia has been reported in patients with null mutations in SCN4A. A homozygous null is embryonic lethal, while compound heterozygous mutations (null allele plus an LOF allele) result in congenital myopathy with survival to adulthood. Remarkably, family members with a single SCN4A null allele are healthy.

[2888] Phenotypically, mutations in this gene manifest in infancy with global hypotonia, impaired sucking, dysphagia, delayed postural and motor development and later in life with episodic, fluctuating muscle weakness like in periodic paralysis, bilateral facial palsy, ptosis, and ophthalmoparesis. Episodes of periodic weakness could not be triggered by exercise, rest, potassium loading, or food, like in periodic paralysis. In older patients, SCN4A-related CMS may manifest exclusively as easy fatigability. In a 20yo normokalemic female, SCN4A-related CMS manifested as sudden attacks of respiratory and bulbar paralysis since birth, lasting 3-30 min and recurring one to three times per month, delayed motor development, easy fatigability, ptosis, ophthalmoparesis, and later as persisting facial, truncal, or limb weakness. Some patients present with dysmorphism, such as high-arched palate, adduction deformity of the knees or ankles, and increased lumbar lordosis. Some patients are mentally retarded with cerebral atrophy on MRI. RNS may be normal but higher stimulus frequency may trigger a decremental response. AchE inhibitors are only marginally effective. Acetazolamide together with potassium was ineffective.

### Targeting DUX4 for the Prevention and or Treatment of FSHD

[2889] Facioscapulohumeral muscular dystrophy (FSHD) is an autosomal dominant disorder primarily characterized by asymmetric, progressive muscle weakness beginning at the face, shoulders, and upper limbs, which spreads to the lower regions of the body with age. It is the third most common muscular dystrophy, with about 1:8,000-1:22,000 people affected worldwide. Age of onset is variable, ranging from birth to adulthood. Patients with the rare infantile form of FSHD, presenting symptoms before 5 y of age, follow a more severe and rapid course of the disease. At present, FSHD is incurable.

[2890] The majority of FSHD patients (˜95%, FSHD1) have a contraction of the D4Z4 repeat array in chromosome 4q35. Each D4Z4 repeat contains the first two exons of the double homeobox protein 4 (DUX4) gene, with its third (and final) exon located immediately downstream of the array. The D4Z4 array is normally hypermethylated in the course of development. Studies show that the contraction relaxes the chromatin and demethylates DNA in this region, resulting in aberrant DUX4 expression in skeletal muscle.

[2891] The aberrant expression of DUX4 in skeletal muscle is thought to cause FSHD. DUX4 encodes a transcription factor that activates pathways involved in muscle degeneration and apoptosis, events observed in patient muscles. DUX4 also inhibits myogenic differentiation and increases the sensitivity of muscle cells to oxidative stress. DUX4 is normally expressed during early embryonic development, and is then effectively silenced in all tissues except the testis and thymus. Its reactivation in skeletal muscle disrupts numerous signalling pathways that mostly converge on cell death. Thus, DUX4 serves as an attractive therapeutic target and inhibition of DUX4 expression represents be a potential therapy approach for FSHD.

### Targeting DMPK for the Prevention and or Treatment of Myotonic Dystrophy

[2892] Mutations in the DMPK gene cause a form of myotonic dystrophy known as myotonic dystrophy type 1. Myotonic dystrophy is characterized by progressive muscle wasting and weakness. The muscle weakness associated with type 1 particularly affects muscles farthest from the center of the body (distal muscles), such as those of the lower legs, hands, neck, and face. People with this disorder often have prolonged muscle contractions (myotonia) and are not able to relax certain muscles after use.

[2893] The type of mutation that causes myotonic dystrophy type 1 is known as a trinucleotide repeat expansion. This mutation increases the size of the repeated CTG segment in the DMPK gene. People with myotonic dystrophy type 1 have from 50 to 1,000 CTG repeats in most cells. The number of repeats may be even greater in certain types of cells, such as muscle cells.

[2894] The mutated DMPK gene produces an altered version of mRNA, which is a molecular blueprint of the gene that is normally used to guide the production of proteins. Previous studies have shown that the altered mRNA traps proteins to form clumps within the cell. The clumps interfere with the production of many other proteins. These changes prevent muscle cells and cells in other tissues from functioning properly, leading to muscle weakness and the other features of myotonic dystrophy type 1.

[2895] The size of the trinucleotide repeat expansion is associated with the severity of signs and symptoms. People with the classic features of myotonic dystrophy type 1, including muscle weakness and wasting beginning in adulthood, usually have between 100 and 1,000 CTG repeats in their cells. People born with the more severe, congenital form of myotonic dystrophy type 1 tend to have more than 1,000 CTG repeats in their cells. People with the mild form of the condition usually have between 50 and 150 CTG repeats in their cells.

### Targeting GYS1 for the Prevention and or Treatment of Glycogen Storage Disease

[2896] Glycogen storage disease type 0 (also known as GSD 0) is a condition caused by the body's inability to form a complex sugar called glycogen, which is a major source of stored energy in the body. GSD 0 has two types: in muscle GSD 0, glycogen formation in the muscles is impaired, and in liver GSD 0, glycogen formation in the liver is impaired.

[2897] The signs and symptoms of muscle GSD 0 typically begin in early childhood. Affected individuals often experience muscle pain and weakness or episodes of fainting (syncope) following moderate physical activity, such as walking up stairs. The loss of consciousness that occurs with fainting typically lasts up to several hours. Some individuals with muscle GSD 0 have a disruption of the heart's normal rhythm (arrhythmia) known as long QT syndrome. In all affected individuals, muscle GSD 0 impairs the heart's ability to effectively pump blood and increases the risk of cardiac arrest and sudden death, particularly after physical activity. Sudden death from cardiac arrest can occur in childhood or adolescence in people with muscle GSD 0.

[2898] The GYS1 gene provides instructions for making muscle glycogen synthase; this form of the enzyme is produced in most cells, but it is especially abundant in heart (cardiac) muscle and the muscles used for movement (skeletal muscles). During cardiac muscle contractions or rapid or sustained movement of skeletal muscle, glycogen stored in muscle cells is broken down to supply the cells with energy.

[2899] Mutations in the GYS1 gene lead to a lack of functional glycogen synthase, which prevents the production of glycogen from glucose. Mutations that cause GSD 0 result in a complete absence of glycogen in muscle cells. As a result, these cells do not have glycogen as a source of stored energy to draw upon following physical activity or fasting. People with muscle GSD 0 do not have any stored energy, which leads to muscle pain, weakness, or episodes of fainting following moderate physical activity. Since there is no glycogen in cardiac muscle, affected individuals are also at an increased risk of cardiac arrest and sudden death, particularly after physical activity.

### Targeting SMN1 for the Prevention and or Treatment of Spinal Muscular Atrophy.

[2900] Spinal muscular atrophy is a genetic disorder characterized by weakness and wasting (atrophy) in muscles used for movement (skeletal muscles). It is caused by a loss of specialized nerve cells, called motor neurons that control muscle movement. The weakness tends to be more severe in the muscles that are close to the center of the body (proximal) compared to muscles away from the body's center (distal). The muscle weakness usually worsens with age. There are many types of spinal muscular atrophy that are caused by changes in the same genes. The types differ in age of onset and severity of muscle weakness; however, there is overlap between the types. Other forms of spinal muscular atrophy and related motor neuron diseases, such as spinal muscular atrophy with progressive myoclonic epilepsy, spinal muscular atrophy with lower extremity predominance, X-linked infantile spinal muscular atrophy, and spinal muscular atrophy with respiratory distress type 1 are caused by mutations in other genes.

[2901] Mutations in the SMN1 gene cause all types of spinal muscular atrophy described above. The number of copies of the SMN2 gene modifies the severity of the condition and helps determine which type develops. The SMN1 and SMN2 genes both provide instructions for making a protein called the survival motor neuron (SMN) protein. Normally, most functional SMN protein is produced from the SMN1 gene, with a small amount produced from the SMN2 gene. Several different versions of the SMN protein are produced from the SMN2 gene, but only one version is functional; the other versions are smaller and quickly broken down. The SMN protein is one of a group of proteins called the SMN complex, which is important for the maintenance of motor neurons. Motor neurons transmit signals from the brain and spinal cord that tell skeletal muscles to tense (contract), which allows the body to move.

### Targeting GAA for the Prevention and or Treatment of Pompe Disease

[2902] Pompe disease is to an inherited disorder caused by the buildup of a complex sugar called glycogen in the body's cells. The accumulation of glycogen in certain organs and tissues, especially muscles, impairs their ability to function normally. There are three types of Pompe disease, which differ in severity and the age at which they appear. These types are known as classic infantile-onset, non-classic infantile-onset, and late-onset. The classic form of infantile-onset Pompe disease begins within a few months of birth. Infants with this disorder typically experience muscle weakness (myopathy), poor muscle tone (hypotonia), an enlarged liver (hepatomegaly), and heart defects. Affected infants may also fail to gain weight and grow at the expected rate (failure to thrive) and have breathing problems. If untreated, this form of Pompe disease leads to death from heart failure in the first year of life. The non-classic form of infantile-onset Pompe disease usually appears by age 1. It is characterized by delayed motor skills (such as rolling over and sitting) and progressive muscle weakness. The heart may be abnormally large (cardiomegaly), but affected individuals usually do not experience heart failure. The muscle weakness in this disorder leads to serious breathing problems, and most children with non-classic infantile-onset Pompe disease live only into early childhood. The late-onset type of Pompe disease may not become apparent until later in childhood, adolescence, or adulthood. Late-onset Pompe disease is usually milder than the infantile-onset forms of this disorder and is less likely to involve the heart. Most individuals with late-onset Pompe disease experience progressive muscle weakness, especially in the legs and the trunk, including the muscles that control breathing. As the disorder progresses, breathing problems can lead to respiratory failure.

[2903] Mutations in the GAA gene cause Pompe disease. The GAA gene provides instructions for producing an enzyme called acid alpha-glucosidase (also known as acid maltase). This enzyme is active in lysosomes, which are structures that serve as recycling centers within cells. The enzyme normally breaks down glycogen into a simpler sugar glucose, which is the main energy source for most cells. Mutations in the GAA gene prevent acid alpha-glucosidase from breaking down glycogen effectively, which allows this sugar to build up to toxic levels in lysosomes. This buildup damages organs and tissues throughout the body, particularly the muscles, leading to the progressive signs and symptoms of Pompe disease.

### Targeting MUC5B for the Prevention and or Treatment of Idiopathic Pulmonary Fibrosis

[2904] The MUC5B promoter polymorphism is the strongest and the most replicated genetic risk factor for IPF, is protective and predictive in this disease, and is involved in disease pathogenesis through an increase in MUC5B expression in terminal bronchi and honeycombed cysts (see, e.g., Yang, et al. Ann Am Thorac Soc. 2015 November; 12(Suppl 2): S193-S199).

### Targeting TSLP for the Prevention and or Treatment of Asthma

[2905] Thymic stromal lymphopoietin (TSLP) is an epithelial cell-derived cytokine implicated in the initiation and persistence of inflammatory pathways in asthma. Released in response to a range of epithelial insults (eg, allergens, viruses, bacteria, pollutants, and smoke), TSLP initiates multiple downstream innate and adaptive immune responses involved in asthma inflammation. Inhibition of TSLP is postulated to represent a novel approach to treating the diverse phenotypes and endotypes of asthma. Tezepelumab, the TSLP inhibitor farthest along in clinical development, is a human monoclonal antibody (IgG2λ) that binds specifically to TSLP, preventing interactions with its heterodimeric receptor and has been demonstrated to provide clinically meaningful improvements in asthma.

### Targeting IL33 for the Prevention and or Treatment of Asthma and Chronic Rhinosinusitis

[2906] Interleukin (IL)-33 is a key cytokine involved in type 2 immunity and allergic airway diseases. Abundantly expressed in lung epithelial cells, IL-33 plays critical roles in both innate and adaptive immune responses in mucosal organs. In innate immunity, IL-33 and group 2 innate lymphoid cells (ILC2s) provide an essential axis for rapid immune responses and tissue homeostasis. In adaptive immunity, IL-33 interacts with dendritic cells, Th2 cells, follicular T cells, and regulatory T cells, where IL-33 influences the development of chronic airway inflammation and tissue remodeling. The clinical findings that both the IL-33 and ILC2 levels are elevated in patients with allergic airway diseases demonstrate that inhibition od IL-33 is useful for treatment of these diseases.

### Targeting ALOX15 for the Prevention and or Treatment of Nasal Polyps and Chronic Rhinosinusitis

[2907] Nasal polyps (NP) are lesions on the nasal and paranasal sinus mucosa and are a risk factor for chronic rhinosinusitis (CRS). We performed genome-wide association studies on NP and CRS in Iceland and the UK (using UK Biobank data) with 4,366 NP cases, 5,608 CRS cases, and >700,000 controls. We found 10 markers associated with NP and 2 with CRS. We also tested 210 markers reported to associate with eosinophil count, yielding 17 additional NP associations. Of the 27 NP signals, 7 associate with CRS and 13 with asthma. Most notably, a missense variant in ALOX15 that causes a p.Thr560Met alteration in arachidonate 15-lipoxygenase (15-LO) confers large genome-wide significant protection against NP (P=8.0×10-27, odds ratio=0.32; 95% confidence interval=0.26, 0.39) and CRS (P=1.1×10-8, odds ratio=0.64; 95% confidence interval=0.55, 0.75). p.Thr560Met, carried by around 1 in 20 Europeans, was previously shown to cause near total loss of 15-LO enzymatic activity. Our findings identify 15-LO as a potential target for therapeutic intervention in NP and CRS (see, e.g., Kristjansson R P, et al. Nat Genet. 2019 February; 51(2):267-276).

[2908] Unless otherwise defined, all technical and scientific terms used herein have the same meaning as commonly understood by one of ordinary skill in the art to which this invention belongs. Although methods and materials similar or equivalent to those described herein can be used in the practice or testing of the RNAi agents and methods featured in the invention, suitable methods and materials are described below. All publications, patent applications, patents, and other references mentioned herein are incorporated by reference in their entirety. In case of conflict, the present specification, including definitions, will control. In addition, the materials, methods, and examples are illustrative only and not intended to be limiting.

[2909] This invention is further illustrated by the following examples which should not be construed as limiting. The entire contents of all references, patents and published patent applications cited throughout this application, as well as the informal Sequence Listing and Figures, are hereby incorporated herein by reference.

### EXAMPLES

### Example 1: Design and Synthesis of αvβ6 Small Molecule Targeting Ligands

[chemical structure]

[2910] Compound 2: To a mixture of PPh₃ (237 g, 904 mmol, 1.30 eq) and imidazole (61.6 g, 904 mmol, 1.30 eq) in DCM (700 mL) was added I₂ (230 g, 904 mmol, 182 mL, 1.30 eq) portion-wise at 0-5° C. The reaction mixture was stirred at 0-5° C. for 0.5 hrs. To this reaction mixture was added to a solution of compound 1 (140 g, 695.61 mmol, 1.00 eq) in DCM (700 mL) dropwise below 15° C. and stirred the mixture overnight (12 hrs). TLC (Petroleum ether/Ethyl acetate=0/1, Rf=0.84) and Petroleum ether/Ethyl acetate=5/1 indicated no compound 1 was remained, and one major new spot with lower polarity was detected (Rf=0.43). The reaction mixture was filtered and concentrated under reduced pressure to give a residue. The residue was purified by column chromatography (SiO₂, Petroleum ether/Ethyl acetate=100/1 to 5/1). Compound 2 (203 g, 652 mmol, 93.8% yield) was obtained as a yellow liquid.
[2911] Compound 4: To a mixture of compound 2 (48.0 g, 154 mmol, 1.00 eq) and compound 3 (21.1 g, 147 mmol, 0.950 eq) in THF (740 mL) was added LiHMDS (1 M, 154 mL, 1.00 eq) drop-wise in one portion at 0° C. under N₂. The mixture was stirred at 0° C. for 3 hrs. TLC (Dichloromethane/Methanol=20/1, Rf=0.43) indicated some of compound 2 was remained, and one major new spot with larger polarity was detected. The reaction mixture was quenched by saturated solution of NH₄Cl 500 mL at 25° C., and then diluted with H₂O 200 mL and extracted with EtOAc 600 mL (200 mL×3). The combined organic layers were washed with brine 200 mL (100 mL×2), dried over Na₂SO₄, filtered and concentrated under reduced pressure to give a residue. The residue was purified by column chromatography (SiO₂, Petroleum ether/Ethyl acetate=100/1 to 3/1) and reversed-phase HPLC. Compound 4 (57.0 g, 174 mmol, 37.6% yield) was obtained as a brown oil with 3 batches.
[2912] Compound 5: To a solution of compound 4 (28.5 g, 87.0 mmol, 1.00 eq) in DCM (50 mL) was added HCl/dioxane (4 M, 109 mL, 5.00 eq) in one portion at 25° C. The mixture was stirred at 25° C. for 1 hr. TLC (Dichloromethane/Methanol=20/1, Rf=0) and LCMS indicated no compound 4 was remained, and one major new spot with larger polarity was detected. The reaction mixture was concentrated under reduced pressure to give a residue. The crude product was used into the next step without further purification. Compound 5 (53.0 g, crude, 2HCl) was obtained as a brown solid. ¹H NMR: MeOD, 400 MHz, 9.32 (dd, J=1.7, 5.1 Hz, 1H), 9.13 (dd, J=1.8, 8.3 Hz, 1H), 8.93 (d, J=8.6 Hz, 1H), 8.16-8.05 (m, 2H), 3.56 (dd, J=7.6, 11.6 Hz, 1H), 3.46 (ddd, J=4.0, 8.3, 11.9 Hz, 1H), 3.36 (br d, J=2.2 Hz, 1H), 3.32-3.23 (m, 2H), 3.03-2.94 (m, 1H), 2.56-2.42 (m, 1H), 2.41-2.28 (m, 1H), 2.25-2.02 (m, 2H), 1.79 (qd, J=9.0, 12.9 Hz, 1H). LCMS (ESI) calculated for C₁₄H₁₇N₃[M+H]⁺ m/z=228.14, found 228.0.
[2913] Compound 6: To a mixture of compound 5 (26.5 g, 88.3 mmol, 1.00 eq, 2HCl) and compound 10 (18.2 g, 115 mmol, 1.30 eq) in DCM (265 mL) was added KOAc (30.3 g, 310 mmol, 3.50 eq) and Pd(dppf)Cl₂·CH₂Cl₂ (7.21 g, 8.83 mmol, 0.100 eq) in one portion at 25° C. under N₂. The mixture was stirred at 25° C. for 2 hrs under N₂. TLC (Dichloromethane/Methanol=10/1, Rf=0.31) indicated no compound 5 was remained, and one major new spot with lower polarity was detected. LCMS indicated desired MS. The reaction mixture was filtered and concentrated under reduced pressure to give a residue. The residue was resolved in H₂O (100 mL). The mixture was acidified by 2N HCl until PH=4. The mixture was washed by EtOAc 300 mL (100 mL×3). The aqueous phase was basified by saturated solution of Na₂CO₃ until PH>8 and extracted with DCM 300 mL (100 mL×3), dried over Na₂SO₄, filtered and concentrated under reduced pressure to give a residue. The crude product was used into the next step without further purification. Compound 6 (52.0 g, 160 mmol, 90.5% yield) was obtained as a brown solid. ¹H NMR: CDCl₃, 400 MHz, 9.08 (dd, J=2.0, 4.3 Hz, 1H), 8.16 (dd, J=2.0, 8.1 Hz, 1H), 8.10 (d, J=8.3 Hz, 1H), 7.45 (dd, J=4.2, 8.0 Hz, 1H), 7.39 (d, J=8.3 Hz, 1H), 6.99 (td, J=6.1, 15.7 Hz, 1H), 5.99 (td, J=1.5, 15.7 Hz, 1H), 3.74 (s, 3H), 3.31-3.17 (m, 2H), 3.12-3.00 (m, 2H), 2.92-2.85 (m, 1H), 2.75-2.66 (m, 1H), 2.48 (dt, J=6.1, 8.7 Hz, 1H), 2.33-2.16 (m, 2H), 2.13-1.92 (m, 4H), 1.60-1.42 (m, 1H). LCMS (ESI) calculated for C₁₉H₂₃N₃O₂ [M+H]⁺ m/z=325.18, found 326.3.
[2914] Compound 7A: To a mixture of compound 6 (20.0 g, 61.5 mmol, 1.00 eq), KOH (3.62 g, 64.5 mmol, 1.05 eq), (R)-BINAP (3.83 g, 6.15 mmol, 0.100 eq) and compound 17 (34.1 g, 70.7 mmol, 1.15 eq) in dioxane (200 mL) and H₂O (20.0 mL) was added chlororhodium; (1Z,5Z)-cycloocta-1,5-diene (1.52 g, 3.07 mmol, 0.050 eq) in one portion at 25° C. under N₂. The mixture was heated to 100° C. and stirred for 4 hrs under N₂. TLC (Dichloromethane/Methanol=10/1, Rf=0.37) indicated no compound 6 was remained, and one major new spot with lower polarity was detected. LCMS indicated desired MS. The reaction mixture was concentrated under reduced pressure to remove dioxane. The residue was diluted with H₂O 200 mL and extracted with DCM 450 mL (150 mL×3). The combined organic layers were washed with brine 200 mL (100 mL×2), dried over Na₂SO₄, filtered and concentrated under reduced pressure to give a residue. The residue was purified by column chromatography (SiO₂, DCM/MeOH=100/1 to 5/1) and reversed-phase HPLC. The product was further separated by SFC (condition: column: DAICEL CHIRALPAK AD (250 mm×50 mm, 10 um); mobile phase: [0.1% NH₃H₂O ETOH]; B %: 40%-40%, 5.6 min). Compound 7A (14.5 g, 21.3 mmol, 34.6% yield) was obtained as a yellow solid. Chiral SFC indicated its structure. LCMS (ESI) calculated for C₃₉H₅₁N₇O₄[M+H]⁺ m/z=681.4, found 682.2.
[2915] Compound 7B: To a mixture of compound 6 (23.0 g, 70.7 mmol, 1.00 eq), KOH (4.16 g, 74.2 mmol, 1.05 eq), (S)-BINAP (4.40 g, 7.07 mmol, 0.100 eq) and compound 17 (39.2 g, 81.3 mmol, 1.15 eq) in dioxane (200 mL) and H₂O (20.0 mL) was added chlororhodium; (1Z,5Z)-cycloocta-1,5-diene (1.74 g, 3.53 mmol, 0.050 eq) in one portion at 25° C. under N₂. The mixture was heated to 100° C. and stirred for 4 hrs under N₂. TLC (Dichloromethane/Methanol=10/1, Rf=0.43) indicated no compound 6 was remained, and one major new spot with lower polarity was detected. The reaction mixture was concentrated under reduced pressure to remove dioxane. The residue was diluted with H₂O 200 mL and extracted with DCM 450 mL (150 mL×3). The combined organic layers were washed with brine 200 mL (100 mL×2), dried over Na₂SO₄, filtered and concentrated under reduced pressure to give a residue. The residue was purified by column chromatography (SiO₂, DCM/MeOH=100/1 to 5/1) and revers phase HPLC. The product was further separated by SFC (condition: column: DAICEL CHIRALPAK AD (250 mm×50 mm, 10 um); mobile phase: [0.1% NH₃H₂O ETOH]B %: 40%-40% 5.2 min). Compound 7B (15.0 g, 22.0 mmol, 31.1% yield) was obtained as a yellow solid. Chiral SFC indicated its structure.

[chemical structure]

[2916] Compound 8A: To a solution of compound 7A (14.5 g, 21.3 mmol, 1.00 eq) in MeOH (150 mL) was added Pd/C (3.00 g, 21.3 mmol, 10% purity, 1.00 eq) in one portion at 25° C. The mixture was stirred at 25° C. for 12 hrs under H₂ (30 psi). TLC (Dichloromethane/Methanol=10/1, Rf=0.27) indicated no compound 7A was remained, and one major new spot with larger polarity was detected. LCMS indicated desired MS. The reaction mixture was filtered and concentrated under reduced pressure to give a residue. The residue was purified by prep-HPLC. Compound 8A (10.5 g, 15.3 mmol, 72.0% yield, 100% purity) was obtained as a yellow solid. ¹H NMR. MeOD, 400 MHz, 7.11 (d, J=7.3 Hz, 1H), 6.94 (s, 1H), 6.86 (s, 1H), 6.77 (s, 1H), 6.35 (d, J=7.3 Hz, 1H), 6.06 (s, 1H), 3.57 (s, 7H), 3.41-3.34 (m, 3H), 3.25-3.17 (m, 4H), 2.93-2.77 (m, 3H), 2.75-2.66 (m, 3H), 2.65-2.56 (m, 2H), 2.54-2.38 (m, 3H), 2.26 (d, J=6.7 Hz, 6H), 2.21-2.13 (m, 1H), 2.13-2.03 (m, 1H), 2.02-1.92 (m, 1H), 1.91-1.83 (m, 2H), 1.67 (q, J=7.5 Hz, 2H), 1.50 (s, 9H), 1.45-1.36 (m, 1H). LCMS (ESI) calculated for C₃₉H₅₅N₇O₄ [M+H]⁺ m/z=685.43, found 686.3.
[2917] Compound 9A: To a solution of 8A (1.50 g, 2.19 mmol, 1.00 eq) in DCM (10.0 mL) was added HCl/dioxane (4 M, 2.73 mL, 5.00 eq) at 25° C. The reaction mixture was stirred at 25° C. for 2 hrs. TLC (Dichloromethane/Methanol=10/1, Rf=0.06) indicated no 8A was remained, and one major new spot with larger polarity was detected. The reaction mixture was concentrated under reduced pressure. The residue was resolved in water (50 mL). The aqueous phase was basified by saturated solution of Na₂CO₃ until PH>8 and extracted with DCM 150 mL (50 mL×3), dried over Na₂SO₄, filtered, and concentrated under reduced pressure to give a residue. The crude product was used into the next step without further purification. Compound 9A (1.30 g, crude) was obtained as a yellow solid.
[2918] Compound 10A: To a mixture of compound 9A (1.30 g, 2.22 mmol, 1.00 eq) and tetrahydropyran-2,6-dione (253 mg, 2.22 mmol, 1.00 eq) in DCM (10.0 mL) was stirred at 25° C. for 12 hrs. TLC (Dichloromethane/Methanol=10/1, Rf=0.01) and HPLC indicated no compound 9A was remained, and one major new spot with lower polarity was detected. The reaction mixture was concentrated under reduced pressure to give a residue. Compound 10A (1.50 g, 2.14 mmol, 96.6% yield, 100% purity) was obtained as a yellow solid. ¹H NMR: CDCl₃, 400 MHz, 10.45 (br s, 1H), 7.18 (d, J=7.3 Hz, 1H), 6.93 (s, 1H), 6.83 (s, 1H), 6.73 (s, 1H), 6.21 (d, J=7.2 Hz, 1H), 5.97 (s, 1H), 3.91-3.81 (m, 1H), 3.77 (br d, J=13.4 Hz, 1H), 3.73-3.63 (m, 3H), 3.60 (s, 3H), 3.50-3.41 (m, 2H), 3.37-3.29 (m, 1H), 3.28-3.19 (m, 2H), 3.18-3.09 (m, 1H), 2.85-2.52 (m, 11H), 2.39-2.22 (m, 9H), 2.15-2.02 (m, 1H), 2.01-1.83 (m, 5H), 1.68 (q, J=7.4 Hz, 2H), 1.51-1.19 (m, 2H), 1.17-0.63 (m, 1H). LCMS (ESI) calculated for C₃₉H₅₃N₇O₅ [M+H]⁺ m/z=699.41, found 700.3.
[2919] Compound 8B: To a solution of compound 7B (15.0 g, 22.0 mmol, 1.00 eq) in MeOH (160 mL) was added Pd/C (4.00 g, 23.5 mmol, 10% purity) in one portion at 25° C. under H₂ (15 psi). The mixture was stirred at 25° C. for 12 hrs. TLC (Dichloromethane/Methanol=10/1, Rf=0.24) and LCMS indicated no compound 7B was remained, and one major new spot with larger polarity was detected. The reaction mixture was filtered and concentrated under reduced pressure to give a residue. The residue was purified by prep-HPLC (neutral condition) and SFC (column: Phenomenex-Cellulose-2 (250 mm×50 mm, 10 um); mobile phase: [0.1% NH₃H₂O ETOH]; B %: 50%-50%, 10.2 min). 8B (7.00 g, 10.2 mmol, 46.4% yield, 98.8% purity) was obtained as a yellow solid. ¹H NMR: MeOD, 400 MHz, 7.11 (d, J=7.3 Hz, 1H), 6.94 (s, 1H), 6.86 (s, 1H), 6.78 (s, 1H), 6.33 (d, J=7.4 Hz, 1H), 6.06 (s, 1H), 3.57 (s, 6H), 3.40-3.34 (m, 3H), 3.25-3.16 (m, 4H), 2.89-2.44 (m, 12H), 2.26 (d, J=6.9 Hz, 6H), 2.14-2.04 (m, 2H), 2.01-1.84 (m, 3H), 1.66 (q, J=7.4 Hz, 2H), 1.50 (s, 9H), 1.45-1.36 (m, 1H). LCMS (ESI) calculated for C₃₉H₅₅N₇O₄ [M+H]⁺ m/z=685.43, found 686.3.
[2920] Compound 9B: To a solution of 8B (1.00 g, 1.46 mmol, 1.00 eq) in DCM (2.00 mL) was added HCl/dioxane (4 M, 1.82 mL, 5.00 eq) at 25° C. The reaction mixture was stirred at 25° C. for 2 hrs. TLC (Dichloromethane/Methanol=10/1, Rf=0.06) indicated no 8B was remained, and one major new spot with larger polarity was detected. The reaction mixture was concentrated under reduced pressure. The residue was resolved in H₂O 50.0 mL. The aqueous phase was basified by saturated solution of Na₂CO₃ until PH>8 and extracted with DCM 150 mL (50.0 mL×3), dried over Na₂SO₄, filtered and concentrated under reduced pressure to give a residue. The crude product was used into the next step without further purification. Compound 9B (0.860 g, crude) was obtained as a yellow solid.
[2921] Compound 10B: To a mixture of compound 9B (860 mg, 1.47 mmol, 1.00 eq) and tetrahydropyran-2, 6-dione (168 mg, 1.47 mmol, 1.00 eq) in DCM (10 mL) was stirred at 25° C. for 12 hrs. TLC (Dichloromethane/Methanol=10/1, Rf=0.01) and HPLC indicated no compound 9B was remained, and one major new spot with larger polarity was detected. The reaction mixture was concentrated under reduced pressure to give a residue. 10B (1.10 g, crude, 99.3% purity) was obtained as a yellow solid. ¹H NMR: CDCl₃, 400 MHz, 10.86-10.16 (m, 1H), 7.18 (d, J=7.3 Hz, 1H), 6.88 (s, 1H), 6.82 (s, 1H), 6.70 (s, 1H), 6.19 (d, J=7.3 Hz, 1H), 5.98 (s, 1H), 3.95-3.84 (m, 1H), 3.83-3.68 (m, 2H), 3.60 (s, 3H), 3.45 (br t, J=5.5 Hz, 2H), 3.41-3.32 (m, 2H), 3.29-3.20 (m, 2H), 3.18-3.07 (m, 1H), 2.79-2.58 (m, 8H), 2.57-2.45 (m, 4H), 2.36 (dt, J=3.3, 6.5 Hz, 3H), 2.28 (d, J=10.7 Hz, 6H), 2.13-2.02 (m, 1H), 2.00-1.85 (m, 5H), 1.71 (td, J=7.0, 13.9 Hz, 1H), 1.65-1.55 (m, 1H), 1.37 (br dd, J=6.6, 12.0 Hz, 1H), 1.30-1.24 (m, 1H), 0.97-0.69 (m, 1H). LCMS (ESI) calculated for C₃₉H₅₃N₇O₅ [M+H]⁺ m/z=699.41, found 700.3.

[chemical structure]

[2922] Compound 10: KOAc (40.3 g, 410 mmol, 1.05 eq) was added to a mixture of compound 9 (70.0 g, 391 mmol, 46.0 mL, 1.00 eq) in MeCN (350 mL) at 25° C. The mixture was stirred at 65° C. for 12 hrs. TLC (Petroleum ether/Ethyl acetate=5/1, Rf=0.45) showed that the reaction was complete. The mixture was concentrated to move the solvent. The residue was diluted with water (100 mL) and extracted with EtOAc (60.0 mL×3). The combine organic layer was dried over Na₂SO₄ and concentrated. Compound 10 (59.2 g, 374 mmol, 95.7% yield) was obtained as yellow oil. The product was used for the next step directly. ¹H NMR: CDCl₃, 400 MHz, 6.95 (td, J=4.6, 15.8 Hz, 1H), 6.04 (td, J=2.0, 15.8 Hz, 1H), 4.75 (dd, J=2.0, 4.6 Hz, 2H), 3.76 (s, 3H), 2.13 (s, 3H).
[2923] Compound 12: Compound 11 (250 g, 996 mmol, 1.00 eq) was dissolved in dilute HCl (4:1 in water, 1.00 L) and the mixture was cooled to 0° C. A cooled solution of NaNO₂ (75.6 g, 1.10 mol, 1.10 eq) in H₂O (400 mL) was added to the mixture at 0° C. and stirred for 30 minutes at that temperature. A mixture of SnCl₂·2H₂O (674 g, 2.99 mol, 3.00 eq) in HCl (500 mL) was added to the reaction at 0° C. and stirred at 0° C. for 1 hr. LCMS showed that the reaction was complete. The mixture was filtered and the filtrate cake was washed by water (200 mL). The filtrate cake was dried under vacuum. Compound 12 (353 g, crude, 2HCl) was obtained as yellow solid. LCMS (ESI) calculated for C₆H₆Br₂N₂[M+H]⁺ m/z=263.89, found 264.9, 266.8, 268.9.
[2924] Compound 14: Compound 13 (199 g, 1.99 mol, 204 mL, 2.00 eq) was added to a mixture of compound 12 (337 g, 994. mmol, 1.00 eq, 2HCl) in MeCN (1.50 L) and H₂O (500 mL) at 25° C. The mixture was stirred at 80° C. for 4 hrs. TLC (Petroleum ether/Ethyl acetate=10/1, Rf=0.73) and LCMS showed that the reaction was complete. The mixture was concentrated to remove MeCN. The residue was diluted with water (1.00 L) and basified to pH=7-8 by Na₂CO₃. It was extracted with EtOAc (1.00 L×3), organic layer was concentrated to give the crude product. The product was purified by MPLC (100-200 mesh silica gel, Petroleum ether/Ethyl acetate=100/1-10/1). Compound 14 (272 g, 824 mmol, 82.9% yield) was obtained as yellow solid. ¹H NMR: CDCl₃, 400 MHz, 7.64-7.62 (m, 1H), 7.59 (d, J=1.8 Hz, 2H), 6.01 (s, 1H), 2.35 (s, 3H), 2.29 (s, 3H). LCMS (ESI) calculated for C₁₁H₁₀Br₂N₂[M+H]⁺ m/z=327.92, found 328.9, 330.8, 332.9.
[2925] Compound 16: Pd₂(dba)₃ (6.65 g, 7.26 mmol, 0.02 eq) and BINAP (13.3 g, 21.4 mmol, 0.05 eq) was added to a mixture of compound 14 (133 g, 403.01 mmol, 1 eq), compound 15 (67.5 g, 362 mmol, 0.90 eq) and t-BuONa (77.5 g, 806 mmol, 2.00 eq) in anhydrous toluene (1.30 L) at 25° C. The mixture was stirred at 65° C. for 3 hrs under N₂. TLC (Petroleum ether/Ethyl acetate=5/1, Rf=0.28) showed that the reaction was complete. The mixture was washed by water (150 mL) and separated. The aqueous phase was extracted with EtOAc (100 mL×2). The combined organic layer was concentrated to give the crude product. The product was purified by MPLC (100-200 mesh silica gel, Petroleum ether/Ethyl acetate=100/1-5/1). Compound 16 (96.0 g, 220 mmol, 54.7% yield) was obtained as yellow solid.
[2926] Compound 17: Pd(dppf)Cl₂ (9.80 g, 13.4 mmol, 0.06 eq) was added to a mixture of compound 16 (98.0 g, 225 mmol, 1.00 eq), 4,4,5,5-tetramethyl-2-(4,4,5,5-tetramethyl-1,3,2-dioxaborolan-2-yl)-1,3,2-dioxaborolane (60.0 g, 236 mmol, 1.05 eq) and KOAc (44.2 g, 450 mmol, 2.00 eq) in dioxane (1.00 L) at 25-30° C. The mixture was stirred at 80° C. for 2 hrs under N₂. TLC (Petroleum ether/Ethyl acetate=3/1, Rf=0.26) showed that the reaction was complete. The mixture was washed by water (1.00 L) and separated. The aqueous phase was extracted with EtOAc (1.00 L×2). The combine organic layer was concentrated to give the crude product. The product was purified by MPLC (100-200 mesh silica gel, Petroleum ether/Ethyl acetate=4/1). Compound 17 (236 g, crude) was obtained as yellow solid. LCMS (ESI) calculated for C₂₆H₉₃BN₄O₄[M+H]⁺ m/z=482.3, found 483.1.

[chemical structure]

[2927] Compound 2: To a solution of 1 (9.1 g, 33.7 mmol, 1.0 eq) and 1-1 (9.5 g, 40.4 mmol, 1.2 eq) in toluene (120 ml) were added Cs₂CO₃ (22.0 g, 67.5 mmol, 2.0 eq), t-Bu-Xphots (717.5 mg, 1.69 mmol, 0.05 eq) and Pd(OAc)₂ (382 mg, 1.69 mmol, 0.05 eq) at 25° C. The solution was stirred at 115° C. for 16 h under N₂. After the reaction was completed, the solution was concentrated and the residue was purified by gel chromatography (SiO2, 100-200 mesh, DCM/MeOH=20:1) to give a yellow oil (9.0 g, 56.8% yield). MS(M+H⁺): 468.5
[2928] Compound 3: To a solution of 2 (9.0 g, 19.2 mmol, 1 eq) in MeOH (100 ml) was added Pd/C (10%, 1.0 g) at room temperature. The mixture solution was stirred at room temperature for 16 h under H₂. After the reaction was completed. Fileted and the filtrate was concentrated to give a yellow oil (6.0 g, 93.5% yield). MS(M+H⁺): 334.4
[2929] Compound 4: To a solution of 3 (5.8 g, 17.4 mmol, 1.0 eq) and 3-1 (3.18 g, 17.8 mmol, 1.02 eq) in THF (150 mL) was added TEA (3.5 g, 34.8 mmol, 2 eq) and stirred at room temperature for 16 hours under N₂. After the solution was completed, brine (70 ml) and water (70 ml) were added, extracted with EA (100 mL×2). The organic phase was dried over Na₂SO₄, filtered and concentrated to give a yellow oil (7.48 g, 99.6% yield). MS(M+H⁺): 432.2
[2930] Compound 5: To a solution of 4 (5.2 g, 12.0 mmol, 1 eq) and A-1 (7.43 g, 14.4 mmol, 1.2 eq) in dioxane (100 mL) was added [Rh(COD)CI]₂ (296 mg, 0.6 mmol, CAS:12092-47-6), (R)-BINAP (748 g, 1.2 mmol) and 3.6 M KOH (5.7 mL, 24 mmol), and stirred at 90° C. for 3 hours under N₂. The reaction mixture was diluted with water (100 mL), extracted with EA (100 mL×3). The organic layer was washed with brine (60 mL×2), dried over Na₂SO₄, concentrated under vacuum and purified by reverse chromatography (ACN in 0.1% TFA/water, 10% to 90%) to afford 5 (5.0 g, 50.4% yield, 6.08 mmol) as a yellow solid. MS(M+H⁺): 822.2
[2931] Compound 6: To a solution of 5 (3.5 g, 4.0 mmol) in MeOH (100 mL) was added Pd/C (350 mg) and stirred at room temperature for 16 hours under H₂. After the reaction was completed, remove Pd/C by filtered. The filtrate was concentrated under vacuum to give 6 (2.4 g, 3.49 mmol, 81.9% yield) as a yellow solid. MS(M+H⁺): 688.3
[2932] Compound 8: To a solution of 6 (2.4 g, 3.5 mmol), 5-azidopentanoic acid (550 mg, 3.85 mmol) and DIPEA (910 mg, 7 mmol) in DMF (15 mL) was added HATU (1.73 g, 4.55 mmol) and stirred at room temperature for 16 hours. The mixture was purified by reversed-phase chromatography (ACN in 0.1% TFA/water) to give 8 (2.6 g, 3.2 mmol, 91.4% yield) as a yellow solid. MS(M+H⁺): 813.2
[2933] Compound 9: To the solution of 8 (2.6 g, 3.2 mmol) in DCM (20 mL) was added TFA (10 ml) and stirred at room temperature for 2 hours. The reaction mixture was concentrated to obtain 9 (2.2 g, crude) as a yellow oil which will be used for the next step without purification. MS(M+H⁺): 713.2
[2934] Compound 511: To a solution of 9 (2.2 g, crude) in MeOH (20 mL) and water (20 mL) was added LiOH·H₂O (1.3 g, 31 mmol) and stirred at room temperature for 16 hours. The reaction mixture was concentrated under vacuum and purified by prep-HPLC (ACN in 0.1% FA/water) and SFC to give Target Compd 511 (520 mg, 0.74 mmol, 24.0%) as a white solid. 1H NMR (400 MHz, DMSO-d₆) δ 8.17 (s, 0.46H), 7.03 (d, J=8.0 Hz, 1H), 6.87 (s, 1H), 6.79 (s, 1H), 6.74 (s, 1H), 6.21 (s, 1H), 6.03 (s, 1H), 5.77 (d, J=8.0 Hz, 1H), 3.89-4.0 (m, 2H), 3.58 (br, 4H), 3.43 (br, 2H), 3.14-3.36 (m, 8H), 2.51-2.85 (m, 8H), 2.37-2.49 (m, 4H), 2.25 (s, 3H), 2.16 (s, 3H), 1.88 (m, 1H), 1.74 (m, 2H), 1.58 (m, 4H). 1.42 (m, 1H). MS(M+H⁺): 699.2

[chemical structure]

[2935] Compound 2: To the solution of 1 (15 g, 68.5 mmol) and CH₃I (11.7 g, 82.2 mmol) in DMF (100 mL) was added K₂CO₃ (11.5 g, 82.2 mmol), stirred at room temperature for 16 hours. The reaction mixture was diluted with EA (300 mL), washed with brine (100 mL×3), H₂O (100 mL×3) and LiCl (100 mL×3), dried over Na₂SO₄, concentrated under vacuum. to afford 2 (14.7 g, 90% yield, 63.09 mmol) as a yellow solid. MS(M+H⁺): 233
[2936] Compound 3: To a solution of 2 (10.2 g, 52.3 mmol), 6-bromo-3-methoxy-2-nitropyridine (11.1 g, 47.5 mmol) in DMF (200 mL) was added Pd(PPh₃)₂Cl₂ (3.3 g, 4.75 mmol), CuI (1.80 g, 9.50 mmol), TEA (14.40 g, 142.50 mmol), and stirred at 80° C. for 5 hours under N₂. The reaction mixture was cooled, diluted with water (300 mL), extracted with EA (100 mL×2). The organic layer was washed with LiCl (60 mL×2), dried over Na₂SO₄, concentrated under vacuum. The residue was purified by silica gel chromatography (EA in PE, 0% to 30%) to afford 3 (14 g, 84.95% yield, 40.35 mmol) as a brown solid. MS(M-Na): 370
[2937] Compound 4: To a solution of 3 (14 g, 40.35 mmol) in MeOH (500 mL) was added Raney Nickel (5 mL), and stirred at room temperature for 16 hours under H₂ (1 atm). The reaction mixture was filtered, the filtrate was concentrated under vacuum, the residue was added CH₃CH₂OH (1000 ml) was added Pd/C (1.4 g) and stirred at room temperature for three days under H₂ (1 atm) The reaction mixture was filtered, the filtrate was concentrated under vacuum to afford 4 (11.18 g, 86% yield, 34.83 mmol) as a brown solid. MS(M+H⁺): 322
[2938] Compound 5: To a solution of 4 (10.0 g, 31.15 mmol) in DCM (100 mL) was added 4N HCl/dioxane (100 mL), and stirred at room temperature for 1 hour. The reaction mixture was concentrated, the residue and TEA (9.46 g, 93.49 mmol) was dissolved with DCM (100 mL) and THF (100 mL), to this added methyl (E)-4-bromobut-2-enoate (5.68 g, 31.17 mmol), and stirred at room temperature for 4 hours. The residue was concentrated and diluted with EA (200 mL), washed with 1N HCl (50 mL×3), discard organic phase. The aqueous was adjust pH=8 with 10% NaOH at 0° C., extracted with DCM (100 mL×3). The organic layer was washed with brine (100 mL×2), dried over Na₂SO₄, concentrated under vacuum to afford 5 (6.0 g, 60.4%, 18.81 mmol) as a brown oil. MS(M+H⁺): 320.1
[2939] Compound 7: To a solution of 5 (6.0 g, 18.81 mmol) and 6 (10.9 g, 22.59 mmol) in dioxane (100 mL) was added 3.6 M NaOH (10.4 mL, 37.5 mmol), [Rh(COD)CI]₂ (0.46 g, 0.94 mmol, CAS: 12092-47-6), (R)-BINAP (1.17 g, 1.88 mmol), and stirred at 90° C. for 3 hours under N₂. The reaction mixture was diluted with water (100 mL), extracted with EA (100 mL×3). The organic layer was washed with brine (60 mL×2), dried over Na₂SO₄, concentrated under vacuum and purified by flash (MeOH in DCM, 0% to 20%) to afford 7 (3.2 g, 25.15% yield, 4.73 mmol) as a brown solid. MS(M+H⁺): 676.5
[2940] Compound 8: To a solution of 7 (3.2 g, 4.73 mmol) in MeOH (10 mL) was added 4N HCl/dioxane (30 mL), and stirred at room temperature for 1 hour. The reaction mixture was concentrated under vacuum to give 8 (crude, 4.73 mmol) as a yellow solid. MS(M+H⁺): 576.5
[2941] Compound 9: To a solution of 8 (crude, 4.73 mmol), 5-azidopentanoic acid (542 mg, 3.79 mmol) and DIPEA (1.83 g, 14.19 mmol) in DCM (50 mL) was added HATU (1.98 g, 5.21 mmol), and stirred at room temperature for 30 min. The reaction mixture was diluted with water (100 mL), extracted with DCM (100 mL×2). The organic layers were washed with brine (100 mL) dried over Na₂SO₄, concentrated to give 9 (4.56 g, crude) as a yellow solid. MS(M+H⁺): 701.5
[2942] Compound 512: To the solution of 9 (1.5 g, 2.14 mmol) in THF (20 mL) and water (10 mL) was added LiOH (450 mg, 10.71 mmol), and stirred at room temperature for 2 hours. The reaction mixture was adjusted pH=7-8 with 1N HCl, extracted with DCM (50 mL×3), concentrated and purified by prep-HPLC (ACN in 0.1% FA/water) to give Target Compd 512 (615 mg, 0.84 mmol, 39.3% yield) as alight yellow solid. 1H NMR (400 MHz, DMSO-d₆) δ 8.19 (s, 1H), 6.93-6.84 (m, 2H), 6.80 (s, 1H), 6.75 (s, 1H), 6.33 (dd, J=7.8, 3.4 Hz, 1H), 6.03 (s, 1H), 5.57 (d, J=13.5 Hz, 2H), 3.72 (s, 3H), 3.59 (s, 4H), 3.18 (d, J=21.0 Hz, 5H), 3.09-2.53 (m, 7H), 2.48-2.36 (m, 6H), 2.36-2.18 (m, 4H), 2.16 (s, 3H), 2.10-1.97 (m, 1H), 1.97-1.82 (m, 1H), 1.66-1.54 (m, 6H), 1.37 (dq, J=14.9, 7.5 Hz, 1H). MS(M+H⁺): 687.3

[chemical structure]

[2943] Compound 2: To a solution of 1 (27.5 g, 201.55 mmol) in acetone (46.28 g, 398.44 mmol) was added POCl₃ (100 mL). The reaction mixture was then heated for 5.5 h at 80 C. Next, the reaction mixture was carefully added to 200 mL ice water, which was then basified to pH 14 with NaOH (6 M aq) and stirred for 40 min (with additional base added to maintain pH 14). The aqueous material was split into two portions. Each portion was extracted with DCM (100 mL×6). The organic layers were combined and concentrated under vacuum to obtain 2 (crude, 201.55 mmol) as a brown solid. MS(M+H⁺): 179.1
[2944] Compound 3: To a solution of 2 (crude, 201.55 mmol) in MeOH (200 mL) was added NaOMe (24.8 mL, 403.1 mmol), and stirred at 40° C. for 16 hours. The reaction mixture was diluted with water (100 mL), extracted with EA (100 mL×3). The organic layer was washed with brine (60 mL×2), dried over Na₂SO₄, concentrated under vacuum and purified by reverse chromatography (DCM:MeOH 30:1) to afford 3 (3.3 g, 9.42% yield, 18.94 mmol) as a brown solid. MS(M+H⁺): 175.2
[2945] Compound 4: To a stirred solution of 3 (3.3 g, 18.94 mmol) and tert-butyl (R)-3-(iodomethyl) pyrrolidine-1-carboxylate (3.84 g, 12.63 mmol) in THF was cooled to 0° C. and treated under nitrogen with a solution of LiHMDS (18.9 ml, 18.9 mmol) in THF. The reaction mixture was stirred at 0° C. for 3 h. The reaction was quenched with saturated NH₄Cl solution (500 mL) and water (500 ml) and ethyl acetate (1 L) was added. The layers were separated and the aqueous phase was extracted with further ethyl acetate (1 L). The combined organic layers were dried (MgSO₄), filtered and evaporated in vacuum. The residual brown oil was purified by chromatography (PE: EtOAc 10:1) to give 4 (1.87 g, 27.62% yield, 2.23 mmol) as a brown solid. MS(M+H⁺): 358.2
[2946] Compound 5: To a solution of 4 (1.87 g, 5.23 mmol) in DCM (10 mL) was added 4M HCl/dioxane (10 mL), and stirred at room temperature for 2 hours. The reaction mixture was concentrated under vacuum to give 5 (crude, 6.88 mmol) as a brown oil. MS(M+H⁺): 258.2
[2947] Compound 6: To a solution of methyl (E)-4-bromobut-2-enoate (1.47 g, 8.24 mmol) in THF (10 mL) was added a solution of 5 (1.77 g, 6.87 mmol) and TEA (2.78 g, 24.48 mmol) in THF (15 mL), and stirred at room temperature for 16 hours. The reaction mixture was diluted with 1N HCl (300 mL), extracted with DCM (100 mL×2), discard organic phase. The aqueous was adjust pH=8 with 10% NaOH at 0° C., extracted with DCM (100 mL×3). The organic layer was washed with brine (100 mL×2), dried over Na₂SO₄, concentrated under vacuum to afford 6 (1.32 g, 54.10%, 3.72 mmol) as a brown oil. MS(M+H⁺): 356.2
[2948] Compound 7: To a solution of 6 (4.0 g, 11.25 mmol) and A-1 (7.6 g, 14.72 mmol) in dioxane (50 mL) was added [Rh(COD)CI]₂ (0.28 g, 0.56 mmol, CAS:12092-47-6), (R)-BINAP (0.70 g, 1.13 mmol) and 3.6 M NaOH (6.3 mL, 22.5 mmol), and stirred at 90° C. for 3 hours under N₂. The reaction mixture was diluted with water (100 mL), extracted with EA (100 mL×3). The organic layer was washed with brine (60 mL×2), dried over Na₂SO₄, concentrated under vacuum and purified by reverse chromatography (ACN in 0.1% TFA/water, 5% to 40%) to afford 7 (3.3 g, 39.4% yield, 4.43 mmol) as a brown solid. MS(M+H⁺): 746.2
[2949] Compound 8: To a solution of 7 (3.3 g, 4.43 mmol) in MeOH (30 mL) and EA (30 mL) was added Pd/C (600 mg). The mixture was stirred at room temperature for 48 hours under H₂ (1 atm). The reaction mixture was filtered and concentrated under vacuum to give 8 (2.3, 3.73 mmol, 84.2% yield) as a brown solid. MS(M+H⁺): 616.5
[2950] Compound 9: To a solution of 8 (2.3 g, 3.73 mmol), 5-azidopentanoic acid (530 mg, 3.70 mmol) and DIPEA (1.45 g, 11.24 mmol) in DCM (30 mL) was added HATU (1.85 g, 4.87 mmol). The mixture was stirred at room temperature for 1 hour. The mixture was purified by reversed-phase chromatography (5% to 50%, ACN in 0.1% TFA/water) to give 9 (2.0 g, 2.70 mmol, 72.4% yield) as a yellow solid. MS(M+H⁺): 741.5
[2951] Compound 513: To the solution of 9 (2.0 g, 2.7 mmol) in THF (20 mL) and water (5 mL) was added LiOH·H₂O (568 mg, 13.52 mmol), and stirred at room temperature for 2 hours. The reaction mixture was concentrated and purified by prep-HPLC (ACN in 0.1% FA/water) to give Target Compd 513 (590 mg, 0.81 mmol, 30% yield) as a white solid. ¹H NMR (400 MHz, DMSO-d₆) δ 6.86 (s, 1H), 6.79 (s, 1H), 6.74 (s, 1H), 6.19 (s, 1H), 6.10 (d, J=7.4 Hz, 1H), 6.03 (s, 1H), 3.73 (s, 3H), 3.58 (s, 5H), 3.27-3.12 (m, 8H), 2.94-2.86 (m, 1H), 2.79 (dd, J=16.0, 7.5 Hz, 2H), 2.70 (dd, J=16.0, 7.1 Hz, 1H), 2.63-2.52 (m, 2H), 2.48-2.35 (m, 8H), 2.26 (s, 3H), 2.16 (s, 3H), 2.05 (dt, J=14.6, 7.3 Hz, 1H), 1.96-1.84 (m, 1H), 1.70 (dd, J=11.1, 5.9 Hz, 2H), 1.67-1.53 (m, 6H), 1.36 (dd, J=11.7, 7.1 Hz, 1H). MS(M+H⁺): 727.3

[chemical structure]

[2952] Compound 2: To a stirred solution of 10A (5 g, 7.14 mmol) in tetrahydrofuran (100 mL) in a round bottom flask at room temperature, phenoxyacetic anhydride (6.14 g, 21.43 mmol) was added. After the solution had stirred for 60 h the solvent was removed under vacuum leaving a residue with a mass of 11.63 g. This residue was taken up in DCM (100 mL), washed with sat. NH₄Cl (100 mL) and brine (100 mL), dried over Na₂SO₄, and the solvent was removed under vacuum affording 11.15 g of crude product 2 which was used in the next step without further purification. MS (ESI+APCI), calculated for C₄₇H₅₉N₇O₇ [M+H]⁺ exact mass m/z=834.45, found 834.5.
[2953] Compound 354P: To a stirred solution of crude product 2 (11.15 g) in DCM (75 mL), EDC (6.85 g, 35.72 mmol) was added. The mixture was stirred at rt for 10 min and then pentafluorophenol (6.57 g, 35.72 mmol) and 4-(dimethylamino)pyridine (261.84 mg, 2.14 mmol) were added. The reaction was stirred at room temperature for 18 h and then water (75 mL) was added. This mixture was transferred to a separatory funnel and the layers were separated. The organic layer was washed with brine (75 mL), dried over Na₂SO₄, and concentrated under vacuum to a mass of 16.83 g. The crude residue was taken up in DCM and purified on a 220 g silica gold column with a 5-55% THF/DCM gradient affording 4.33 g (61% yield) of pure product 354P as a white foam. ¹H NMR (600 MHz, CD₃CN) δ 7.44 (d, J=7.6 Hz, 1H), 7.24 (dd, J=8.8, 7.3 Hz, 2H), 6.90 (t, J=7.4 Hz, 2H), 6.81 (d, J=1.5 Hz, 1H), 6.81-6.77 (m, 3H), 6.72 (t, J=1.6 Hz, 1H), 5.99 (s, 1H), 5.25 (s, 2H), 3.83 (t, 2H), 3.66 (t, J=5.3 Hz, 2H), 3.58 (t, J=5.3 Hz, 2H), 3.51 (s, 3H), 3.28 (p, J=7.8 Hz, 1H), 3.19 (t, J=5.2 Hz, 2H), 3.14 (t, J=5.3 Hz, 2H), 2.85-2.77 (m, 4H), 2.77-2.73 (m, 3H), 2.71-2.60 (m, 4H), 2.54-2.45 (m, 4H), 2.42-2.26 (m, 1H), 2.24 (s, 3H), 2.23-2.21 (m, 1H), 2.19 (s, 3H), 2.11-2.03 (m, 1H), 1.99 (p, J=7.3 Hz, 2H), 1.94 (dt, J=4.9, 2.5 Hz, 1H), 1.89 (dt, J=12.2, 6.4 Hz, 3H), 1.77-1.67 (m, 2H), 1.43-1.35 (m, 1H). MS (ESI+APCI), calculated for C₅₃H₅₈F₅N₇O₇[M+H]⁺ exact mass m/z=1000.44, found 1000.2.
   Synthesis for Trivalent Scaffold of αvβ6 Integrin Targeting Ligand

[chemical structure]

[2954] Compound 18 was synthesized by previously described methods (Carbohydrate conjugated ma agents and process for their preparation By: Nair, Jayaprakash K.; Kelin, Alexander V.; Kandasamy, Pachamuthu; Rajeev, Kallanthottahill G.; Manoharan, Muthiah United States, US20150196655 A1 2015-07-16)
[2955] Compound 19: Compound 18 (1.03 g, 1.0 mmol) is dissolved in pyridine (20 mL). NaOH (120 mg, 3 mmol) is added and the reaction mixture stir at room temperature for 18 hours. Triethylamine hydrochloride (413 mg, 3 mmol) was added, stirred for 5 minutes, then concentrated under vacuum to an oil. The crude oil was dissolved in ethyl acetate (40 mL) and washed with 22% NaCl (2×40 mL). The organic layer was dried over Na₂SO₄, filtered, and concentrated under vacuum to give compound 19, which was moved forward to the next step without further purification.
[2956] Compound 20: Compound 19 (1.02 g, 1.0 mmol), HOBt monohydrate (230 mg, 1.5 mmol) and HBTU (493 mg, 1.3 mmol) were dissolved in DMF (10 mL) under an inert atmosphere and cooled to 0° C. DIPEA (0.35 mL, 2.0 mmol) was added, and the reaction was allowed to stir for 5 minutes. A solution of 3-azido-1-propanamine (130 mg, 1.3 mmol) and DMF (5 mL) was added over a period of 10 minutes and the reaction allowed to stir at 0° C. for 4 hours. The reaction was diluted with ethyl acetate (50 mL) and washed with 5% NaCl (1×50 mL), 10% H₃PO₄, 5% NaCl (1×50 mL), 4% NaHCO₃ (1×50 mL), and satd. NaCl (1×50 mL), dried over Na₂SO₄, filtered, and concentrated under vacuum to give crude compound 20. The crude residue was purified by silica gel flash chromatography to give pure compound 20.
[2957] Compound 21: Compound 20 (1.10 g, 1.0 mmol) was dissolved in methanol (10 mL) under an inert atmosphere. Methanesulfonic acid (84 mL, 1.3 mmol) was added, and the reaction was heated to 75° C. and stirred for 18 hours. Triethylamine (0.042 mL, 0.3 mmol) was added, then the reaction was concentrated under reduced vacuum to give compound 21, which was moved forward to the next step without further purification.
[2958] Compound 22: Compound 10A (700 mg, 1.0 mmol), HOBt monohydrate (230 mg, 1.5 mmol) and HBTU (493 mg, 1.3 mmol) were dissolved in DMF (10 mL) under an inert atmosphere and cooled to 0° C. DIPEA (0.87 mL, 5.0 mmol) was added and the reaction was allowed to stir for 5 minutes. A solution of compound 21 (1.04 g, 1.3 mmol) in DMF (5 mL) was added over a period of 10 minutes and the reaction allowed to stir at 0° C. for 4 hours. The reaction was diluted with ethyl acetate (50) and washed with 5% NaCl (50 mL×1), 10% H₃PO₄, 5% NaCl (50 mL×1), 4% NaHCO₃ (50 mL×1), and satd. NaCl (50 mL×1), dried over Na₂SO₄, filtered, and concentrated under vacuum to give crude compound 22. The crude residue was purified by silica gel flash chromatography to give pure compound 22.
[2959] Compound 23: Compound 23 is synthesized in an analogous fashion to compound 22 starting with compounds 10B and 21.

[chemical structure]

### Example 2: Design and Synthesis of αvβ6 Targeting Peptide Ligands

[2960] Peptide 1 was synthesized by Vivitide, LLC (Louisville, KY) according to the following sequence. H-Gly-Cys-Ile-Leu-Asn-Gly-Arg-Thr-Asp-Leu-Gly-Thr-Leu-Leu-Phe-Arg-Cus-Arg-Arg-Asp-Ser-Asp-Cys-Pro-Gly-Ala-Cys-Ile-Cys-Arg-Gly-Asn-Gly-Tyr-Cys-Gly-NH₂ (H-GCILNGRTDLGTLLFRCRRDSDCPGACICRGNGYCG-NH₂) (SEQ ID NO: 121) where disulfide bonds exist between C₂-C₂₇, C₁₇-C₂₉, C₂₃-C₃₅ that were formed by random oxidation with isolation of most thermodynamically stable isomer.

### Peptide 1:

[chemical structure]

[2961] Peptide 2 was synthesized by Vivitide, LLC (Louisville, KY) according to the following sequence. cyclo[Phe-Arg-Gly-Asp-Leu-Ala-Phe-D-Pro-N-Me-Lys(PEG4-(CH₂)₅N₃)] (SEQ ID NO: 122)

### Peptide 2:

[chemical structure]

[2962] Peptide 3 was synthesized by Vivitide, LLC (Louisville, KY) according to the following sequence. c(-K(azido)GPGRGDQTTLA-) (SEQ ID NO: 123)

### Peptide 3:

[chemical structure]

[2963] Peptide 4 was synthesized by Vivitide, LLC (Louisville, KY) according to the following sequence. c(-K(azido)AQGPGRGDQTTLAQA-) (SEQ ID NO: 124). Cyclic structure of peptide 4 is analogous to peptide 3

[2964] Peptide 5 was synthesized by Vivitide, LLC (Louisville, KY) according to the following sequence. c(-K(azido)QSAQGPGRGDQTTLAQAQA-) (SEQ ID NO: 125). Cyclic structure of peptide 5 is analogous to peptide 3

[2965] Peptide 6 was synthesized by Vivitide, LLC (Louisville, KY) according to the following sequence. c(-K(azido)NHQSAQGPGRGDQTTLAQAQTGA-) (SEQ ID NO: 126). Cyclic structure of peptide 6 is analogous to peptide 3

[2966] Peptide 7 was synthesized by Vivitide, LLC (Louisville, KY) according to the following sequence. c(-K(azido)ATNHQSAQGPGRGDQTTLAQAQTGWVA-) (SEQ ID NO: 127). Cyclic structure of peptide 7 is analogous to peptide 3

[2967] Peptide 8 was synthesized by Vivitide, LLC (Louisville, KY) according to the following sequence. c(-K(azido)QVATNHQSAQGPGRGDQTTLAQAQTGWVQNA-) (SEQ ID NO: 128). Cyclic structure of peptide 8 is analogous to peptide 3

[2968] Peptide 9 was synthesized by Vivitide, LLC (Louisville, KY) according to the following sequence. c(-K(azido)GPGAGAQTTLA-). (SEQ ID NO: 129) Cyclic structure of peptide 9 is analogous to peptide 3

[2969] Peptide 10 was synthesized by Vivitide, LLC (Louisville, KY) according to the following sequence. c(-K(azido)QVATNHQSAQGPGAGAQTTLAQAQTGWVQNA-) (SEQ ID NO: 130). Cyclic structure of peptide 10 is analogous to peptide 3

### Example 3: Design and Synthesis of αvβ6 Targeting siRNA Conjugates

[2970] This Example describes methods for the design, synthesis, and conjugation of siRNA agents. Nucleic acid sequences provided herein are represented using standard nomenclature. See the abbreviations of Table 1.

General Conditions for Precursors. Solid-Phase Oligonucleotide Synthesis:

[2971] Oligonucleotides were synthesized on a MerMade-12 DNA/RNA synthesizer. Sterling solvents/reagents from Glen Research, 500-Å controlled pore glass (CPG) solid supports from Prime Synthesis, 2′-deoxy nucleoside and 2′-O-TBDMS ribonucleoside 3′-phosphoramidites from Thermo, and 2′-OMe and 2′-F nucleoside 3′-phosphoramidites were all used as received. The 2′-OMe-uridine-5′-bis-POM-(E) vinyl phosphonate (VP) 3′-phosphoramidite was synthesized according to previously published procedures (Parmar et al, J Med Chem, 2018), dissolved to 0.15 M in 85% acetonitrile 15% dimethylformamide (DMF), and coupled using standard conditions on the synthesizer. Ligand-CPG support was prepared as described below. Low-water content acetonitrile was purchased from EMD Chemicals. A solution of 0.6 M 5-(S-ethylthio)-1H-tetrazole in acetonitrile was used as the activator. The phosphoramidite solutions were 0.15 M in anhydrous acetonitrile with 15% DMF as a co-solvent for 2′-OMe uridine and cytidine. The oxidizing reagent was 0.02 M I₂ in THF/pyridine/water. N,N-Dimethyl-N′-(3-thioxo-3H-1,2,4-dithiazol-5-yl)methanimidamide (DDTT), 0.09 M in pyridine, was used as the sulfurizing reagent. The detritylation reagent was 3% dichloroacetic acid (DCA) in dichloromethane (DCM).

[2972] After completion of the solid-phase synthesis, the CPG solid support was washed with 5% (v/v) piperidine in anhydrous acetonitrile three times with 5-min holds after each flow. The support was then washed with anhydrous acetonitrile and dried with argon. The oligonucleotides were then incubated with 28-30% (w/v) NH₄OH, at 35° C. for 20 h. For, VP-containing oligonucleotides, the CPG solid support was incubated with 28-30% (w/v) NH₄OH containing 5% (v/v) of diethylamine at 35° C. for 20 h (O'Shea et al, Tetrahedron, 2018). For amino containing oligonucleotides, the CPG solid support was incubated with a mixture of ammonia and methylamine (50%-50%, v/v, AMA) 35° C. for 3 h.

[2973] The solvent was collected by filtration, and the support was rinsed with water prior to analysis. After the filtration from the solid support, 2′-O-TBDMS RNA-containing oligonucleotides were subjected to a supplemental deprotection step, with adding triethylamine trihydrofluoride (37% HF) and additional incubation at 45° C. for 2 h. Oligonucleotide solutions of approximately 1 OD₂₆₀ units/mL were used for analysis of the crudes, and 30-50 μL of solution were injected. LC/ESI-MS was performed on an Agilent 6130 single quadrupole LC/MS system using an XBridge C8 column (2.1×50 mm, 2.5 μm) at 60° C. Buffer A consisted of 200 mM 1,1,1,3,3,3-hexafluoro-2-propanol and 16.3 mM triethylamine in water, and buffer B was 100% methanol. A gradient from 0% to 40% of buffer B over 10 min followed by washing and recalibration at a flow rate of 0.70 mL/min. The column temperature was 75° C. All oligonucleotides were purified and desalted, and further annealed to form siRNAs as previously described (Nair et al, JACS, 2014).

[2974] Conjugation of integrin ligands to the sense strand is carried out through various chemical reactions illustrated and described below. Sequences for sense and antisense strands can be found in Table 1.

[chemical structure]

[2975] In a 20 mg scale synthesis, 1 equivalent of sense strand (118) containing 3′-amine was diluted to 1 mL with 1M pH 8.5 NaHCO₃ buffer. To this solution, 2 equivalents of (NHS-C6-DBCO), dissolved in 0.5 mL of anhydrous acetonitrile (ACN), was added. The reaction mixture was incubated at room temperature for 2 hours prior to desalting via size exclusion chromatography (SEC). Afterwards, the DBCO-modified sense strand (119) was resuspended with 1.5 mL of 0.5 M pH 7.5 HEPES buffer, followed by the addition of 1.5 equivalents of azide modified Peptide 1 in 1:1 NMP:1M pH 7.5 HEPES buffer. The resulting mixture was incubated at 37° C. for 2 hrs. Purification was performed using reverse phase chromatography (C₁₈ column) followed by desalting using SEC. [M] calculated for (120) 11410.764 Da, found 11410.82 Da (LC-MS). The purified sense strand conjugate 120 (19 mg, 95% yield, 97% purity via LCMS) was then lyophilized before annealing with the antisense strand. Conjugation of siRNA to azide modified Peptide 2 was performed in an analogous fashion as Peptide 1 to give Compound 121 (19 mg, 95% yield, 96% purity via LCMS, [M] calculated: 8873.904, found 8873.98 Da).

[chemical structure]

[2976] In a 40 mg scale synthesis, 1 equivalent of sense strand (118) containing 3′-amine was diluted to 1 mL with 1M pH 8.5 NaHCO₃ buffer. To this solution, 2 equivalents of N-[((1R,8S,9s)-Bicyclo[6.1.0]non-4-yn-9-yl)methyloxycarbonyloxy]succinimide (NHS-BCN), dissolved in 0.5 mL of anhydrous acetonitrile (ACN), was added. The reaction mixture was incubated at room temperature for 2 hours prior to desalting via size exclusion chromatography (SEC). Afterwards, the BCN-modified sense strand (122) was resuspended with 1.5 mL of 0.5 M pH 7.5 HEPES buffer, followed by the addition of 1.5 equivalents of azide-modified cRGD peptide 3 in 1:1 NMP:1M pH 7.5 HEPES buffer. The resulting mixture was incubated at 37° C. for 2 hrs. Purification was performed using reverse phase chromatography (C₁₈ column) followed by desalting using SEC. The purified sense strand conjugate 123 was then lyophilized before annealing with the antisense strand.

[2977] Conjugation of siRNA to azide-modified cRGD Peptides 4-10 are performed in an analogous fashion to Peptide 3 give Compounds 124-130.

[chemical structure]

[2978] In a 50 mg scale synthesis, sense strand (118) was diluted to 1.25 mL with anhydrous NMP. The integrin ligand (10A) solution was prepared by combining 3 equivalents of (10A), 3 equivalents of 7-Azabenzotriazol-1-yloxy)tripyrrolidinophosphonium hexafluorophosphate (PyAOP) and 9 equivalents of N-Ethyldiisopropylamine (DIPEA) in anhydrous NMP. The two solutions were then mixed and incubated at room temperature for 5 minutes to afford (131). After the reaction reached completion, methyl ester deprotection was performed by adding 5 mL of 10% (v/v) aqueous piperidine to the crude mixture, followed by incubation at 40° C. for 16 hours. Purification was performed using reverse phase chromatography (C₁₈ column) followed by desalting using SEC. [M] calculated for (132) 7793.702 Da, found 7792.61 Da (LC-MS). The purified sense strand conjugate (41 mg, 84% yield, 98% purity via LCMS) was then lyophilized before annealing with the antisense strand.

[2979] Conjugation of siRNA to integrin ligands 461, 462, and 454 is performed in an analogous fashion to Compound 132 give Compounds 461B, 462B, and 454B.

[chemical structure]

[2980] In a 50 mg scale synthesis, sense strand (133) was diluted to 1.25 mL with anhydrous NMP. The integrin ligand (1LA) solution was prepared by combining 6 equivalents of (10A), 6 equivalents of 7-Azabenzotriazol-1-yloxy)tripyrrolidinophosphonium hexafluorophosphate (PyAOP) and 18 equivalents of N-Ethyldiisopropylamine (DIPEA) in anhydrous NMP. The two solutions were then mixed and incubated at room temperature for 5 minutes to afford (134). After the reaction reached completion, methyl ester deprotection was performed by adding 5 mL of 10% (v/v) aqueous piperidine to the crude mixture, followed by incubation at 40° C. for 16 hours. Purification was performed using reverse phase chromatography (C₁₈ column) followed by desalting using SEC. [M] calculated for (135) 8724.808 Da, found 8724.01 Da (LC-MS). The purified sense strand conjugate (33 mg, 66% o yield, 99% o purity via LCMS) was then lyophilized before annealing with the antisense strand.

[2981] Conjugation of siRNA to integrin ligand 10B was performed in an analogous fashion as 10A to give Compound 136 (32 mg, 64% yield, 99% purity, [M] calculated: 8724.808, found 8724.02).

[chemical structure]

[2982] In a 50 mg scale synthesis, sense strand (137) was diluted to 1.25 mL with anhydrous NMP. The integrin ligand (10A) solution was prepared by combining 3 equivalents of (10A), 3 equivalents of 7-Azabenzotriazol-1-yloxy)tripyrrolidinophosphonium hexafluorophosphate (PyAOP) and 9 equivalents of N-Ethyldiisopropylamine (DIPEA) in anhydrous NMP. The two solutions were then mixed and incubated at room temperature for 5 minutes to afford (138). After the reaction reached completion, methyl ester deprotection was performed by adding 5 mL of 10% (v/v) aqueous piperidine to the crude mixture, followed by incubation at 40° C. for 16 hours. Purification was performed using reverse phase chromatography (C₁₈ column) followed by desalting using SEC. The purified sense strand conjugate 139 was then lyophilized before annealing with the antisense strand.

[2983] Conjugation of siRNA to integrin ligand 10B was performed in an analogous fashion as 10A to give Compound 140

[chemical structure]

[2984] In a 40 mg scale synthesis, 1 equivalent of sense strand (137) containing 3′-amine was diluted to 1 mL with 1M pH 8.5 NaHCO₃ buffer. To this solution, 2 equivalents of N-[((1R,8S,9s)-Bicyclo[6.1.0]non-4-yn-9-yl)methyloxycarbonyloxy]succinimide (NHS-BCN), dissolved in 0.5 mL of anhydrous acetonitrile (ACN), was added. The reaction mixture was incubated at room temperature for 2 hours prior to desalting via size exclusion chromatography (SEC). Afterwards, the BCN-modified sense strand (141) was resuspended with 1.5 mL of 0.5 M pH 7.5 HEPES buffer, followed by the addition of 1.5 equivalents of azide-modified cRGD peptide 1 in 1:1 NMP:1M pH 7.5 HEPES buffer. The resulting mixture was incubated at 37° C. for 2 hrs. Purification was performed using reverse phase chromatography (C₁₈ column) followed by desalting using SEC. The purified sense strand conjugate 142 was then lyophilized before annealing with the antisense strand.

[2985] Conjugation of siRNA to azide-modified cRGD Peptides 2-10 is performed in an analogous fashion to Peptide 1 give Compounds 143-149

[chemical structure]

[chemical structure]

[2986] In a 40 mg scale synthesis, 1 equivalent of sense strand (137) containing 3′-amine was diluted to 1 mL with 1M pH 8.5 NaHCO₃ buffer. To this solution, 2 equivalents of N-[((1R,8S,9s)-Bicyclo[6.1.0]non-4-yn-9-yl)methyloxycarbonyloxy]succinimide (NHS-BCN), dissolved in 0.5 mL of anhydrous acetonitrile (ACN), was added. The reaction mixture was incubated at room temperature for 2 hours prior to desalting via size exclusion chromatography (SEC). Afterwards, the BCN-modified sense strand (141) was resuspended with 1.5 mL of 0.5 M pH 7.5 HEPES buffer, followed by the addition of 1.5 equivalents of compound 22 in 1:1 NMP:1M pH 7.5 HEPES buffer. The resulting mixture was incubated at 37° C. for 2 hrs. After the reaction reached completion, methyl ester deprotection was performed by adding 5 mL of 10% (v/v) aqueous piperidine to the crude mixture, followed by incubation at 40° C. for 16 hours. Purification was performed using reverse phase chromatography (C₁₈ column) followed by desalting using SEC. The purified sense strand conjugate 150 was then lyophilized before annealing with the antisense strand.

[2987] Conjugation of siRNA to compound 23 is performed in an analogous fashion to compound 22 to give Compound 151.

[chemical structure]

[2988] In a 40 mg scale synthesis, 1 equivalent of sense strand (133) containing 3′-amine was diluted to 1 mL with 1 M pH 8.5 NaHCO₃ buffer. To this solution, 2 equivalents of N-[((1R,8S,9s)-Bicyclo[6.1.0]non-4-yn-9-yl)methyloxycarbonyloxy]succinimide (NHS-BCN), dissolved in 0.5 mL of anhydrous acetonitrile (ACN), was added. The reaction mixture was incubated at room temperature for 2 hours prior to desalting via size exclusion chromatography (SEC). Afterwards, the 3′-BCN-modified sense strand (122) was resuspended with 1.5 mL of 0.5 M pH 7.5 HEPES buffer, followed by the addition of 1.5 equivalents of azide ligand (511) in 1:1 NMP:1 M pH 7.5 HEPES buffer. The resulting mixture was incubated at 37° C. for 2 hrs. Purification was performed using reverse phase chromatography (C₁₈ column) followed by desalting using SEC. The purified sense strand conjugate was then lyophilized before annealing with the antisense strand.

[2989] Conjugation of siRNA to compounds 512-517 is performed in an analogous fashion to compound 511 to give Compounds 512B-517B.

[chemical structure]

[2990] In a 40 mg scale synthesis, 1 equivalent of sense strand (202) containing 3′-triamine was diluted to 50-100 mM with 1 M pH 8.5 NaHCO₃ buffer. To this solution, 12 equivalents (3 equiv per amino group) of 354P dissolved in 0.5 mL of NMP, was added. The reaction mixture was incubated at room temperature for 12 hours to afford (203). After the reaction reached completion, methyl ester deprotection was performed by adding 5 mL of 10% (v/v) aqueous piperidine to the crude mixture, followed by incubation at 40° C. for 16 hours. Purification was performed using reverse phase chromatography (C₁₈ column) followed by desalting using SEC. The purified sense strand conjugate was then lyophilized before annealing with the antisense strand.

[chemical structure]

[2991] A mixture of PFP-ester intermediate (15 g, 15 mmol) and primary amine intermediate (7.61 g, 14.28 mmol) was dissolved in DCM (80 mL). After the solution was stirred at rt for 23 h the solvent was removed under vacuum. The crude residue (25.3 g) was solid loaded onto a 330 g silica column that had been equilibrated with DCM containing 1% TEA. The column was eluted with a 0-10% MeOH/DCM gradient. Pure fractions were pulled and dried affording 15.2 g (78.9%) of pure amide product as a yellow solid. 1H NMR (600 MHz, DMSO) δ 7.75 (t, J=5.5 Hz, 1H), 7.52 (d, J=7.6 Hz, 1H), 7.33-7.26 (m, 5H), 7.25-7.22 (m, 2H), 7.21-7.14 (m, 5H), 6.97 (d, J=7.6 Hz, 1H), 6.89 (d, J=7.3 Hz, 2H), 6.88-6.84 (m, 4H), 6.82 (s, 1H), 6.78 (d, J=7.7 Hz, 3H), 6.71 (s, 1H), 6.02 (s, 1H), 5.22 (s, 2H), 4.94 (d, 1H), 4.33 (d, 1H), 4.18-4.06 (m, 1H), 3.78 (t, 2H), 3.72 (s, 6H), 3.62-3.55 (m, 3H), 3.54 (s, 2H), 3.46 (s, 3H), 3.20-3.13 (m, 4H), 3.12 (t, J=5.3 Hz, 2H), 3.03-2.96 (m, 3H), 2.78 (dd, J=15.5, 6.2 Hz, 1H), 2.73 (t, J=6.4 Hz, 2H), 2.67 (t, J=9.3 Hz, 2H), 2.63-2.60 (m, 2H), 2.57 (d, J=7.2 Hz, 1H), 2.53 (d, J=8.4 Hz, 1H), 2.39 (t, J=11.6 Hz, 1H), 2.35 (s, 1H), 2.32 (t, J=7.5 Hz, 2H), 2.23 (s, 3H), 2.20 (t, J=7.5 Hz, 1H), 2.15 (s, 3H), 2.13 (d, J=8.2 Hz, 1H), 2.11-2.07 (m, 2H), 2.00 (dq, J=14.3, 6.8 Hz, 2H), 1.96-1.88 (m, 1H), 1.84 (m, 4H), 1.73 (q, J=7.5 Hz, 2H), 1.66 (dd, J=7.6, 2.8 Hz, 2H), 1.47 (m, 2H), 1.38 (m, 2H), 1.35-1.19 (m, 4H), 1.18-1.01 (m, 1H). MS (ESI+APCI), calculated for C₇₉H₉₈N₉O₁ [M+H]⁺ exact mass m/z=1348.74, found 1350.2.

[2992] A solution of amide intermediate (1.0 g, 741.47 mol), succinic anhydride (222.60 mg, 2.22 mmol), and dimethylaminopyridine (272 mg, 2.22 mmol) in DCM (5.7 mL) was stirred at rt for 16 h. The reaction was diluted with DCM (50 mL), washed with 0.1 M triethylammonium bicarbonate buffer (3×50 mL), dried over Na₂SO₄, and dried under vacuum. The crude residue (0.95 g) was taken up in DCM and injected onto a 12 g silica column that had been equilibrated with 5% TEA in DCM. The column was eluted with a 0-20% MeOH/DCM gradient. Pure fractions were pulled and dried affording 1.02 g (88.8%) of the mono-triethylamine salt of succinate adduct product as an off white solid. 1H NMR (600 MHz, DMSO) δ 7.76 (t, J=5.9 Hz, 1H), 7.52 (d, J=7.6 Hz, 1H), 7.30 (dq, J=15.6, 7.5 Hz, 4H), 7.23 (d, J=7.9 Hz, 2H), 7.22-7.15 (m, 5H), 6.97 (d, J=7.6 Hz, 1H), 6.92-6.84 (m, 5H), 6.82 (s, 1H), 6.78 (d, J=8.7 Hz, 3H), 6.71 (s, 1H), 6.01 (s, 1H), 5.76 (s, 8H), 5.35 (s, 1H), 5.31 (s, 3H), 5.22 (s, 2H), 4.18 (s, 1H), 3.80-3.77 (m, 2H), 3.72 (s, 6H), 3.57 (s, 2H), 3.56-3.52 (m, 3H), 3.46 (s, 4H), 3.37 (q, J=7.3 Hz, 13H), 3.16 (s, 3H), 3.12 (s, 2H), 3.04-2.98 (m, 3H), 2.82-2.71 (m, 9H), 2.67 (t, J=8.4 Hz, 2H), 2.61 (td, J=8.2, 2.8 Hz, 2H), 2.57 (d, J=7.4 Hz, 1H), 2.53 (d, J=8.4 Hz, 1H), 2.47 (q, J=3.4 Hz, 2H), 2.45 (d, J=2.9 Hz, 1H), 2.41-2.36 (m, 1H), 2.32 (q, J=6.9 Hz, 3H), 2.23 (s, 3H), 2.20 (dd, J=13.4, 5.5 Hz, 2H), 2.15 (s, 3H), 2.10 (dt, J=10.7, 7.5 Hz, 3H), 2.05-1.93 (m, 2H), 1.91 (s, 2H), 1.84 (m, 3H), 1.73 (q, J=7.4 Hz, 2H), 1.70-1.62 (m, 2H), 1.46 (q, J=10.1 Hz, 2H), 1.39 (m, 2H), 1.33-1.25 (m, 3H), 1.23 (t, J=7.2 Hz, 14H), 1.06 (t, J=7.2 Hz, 8H). MS (ESI+APCI), calculated for C₈₃H₁₀₂N₉O₁₄ [M+H]⁺ exact mass m/z=1448.75, found 1448.6.

[2993] A mixture of the mono-triethylamine salt of succinate adduct (0.50 g, 345 mol) and DIPEA (0.45 g, 3.45 mmol, 600 L) was dissolved in ACN (250 mL) in a round-bottom flask with a reinforced neck. To this solution was added HBTU (157 mg, 414 mol) and the reaction was stirred for ˜10 min. To the reaction mixture was added CPG (3.451 g, 153 mol/g). The reaction was put on the mechanical shaker for 16 h. The mixture was filtered, washed with ACN (200 mL), MeOH (200 mL), ACN (200 mL), diethyl ether (200 mL) and dried on the high vacuum for 4 h. The CPG was transferred to a round-bottom flask with a reinforced neck and a 1:1 mixture of cap A & B (400 mL) was added. (Cap Mix A=5% Phenoxyacetic Anhydride in THF/Pyridine Glen Research pn #40-4210-52) (Cap Mix B=10% 1-Methylimidazole in THF Glen Research pn #40-4120-57). This mixture was put back on the mechanical shaker for 3 h. The reaction mixture was filtered, and the obtained CPG was washed with 10% H₂O/THF (100 mL), MeOH (100 mL), 10% H₂O/THF (100 mL), MeOH (100 mL), ACN (100 mL), and diethyl ether (100 mL) then dried on the high vacuum for 60 h affording 3.22 g of loaded product with a loading of 58.53 mol/g.

[chemical structure]

[chemical structure]

[chemical structure]

[chemical structure]

[chemical structure]

[chemical structure]

[chemical structure]

### Example 4: Evaluation of αvβ6 Integrin Targeting siRNA Conjugates

[2994] Table 2 depicts sense strand sequences and mass data for αvβ6 integrin targeting siRNA conjugates.

TABLE 2

| | | SEQ | | |
|---|---|---|---|---|
| | | ID | Theoretical | Found |
| Sense Strand | Sense Strand Sequence 5′ to 3′ | NO: | Mass | Mass |
| A-2783274 (121) | csasuuuuAfaUfCfCfucacucuaasasL333Z81 | 131 | 8873.904 | 8873.98 |
| A-2783272 (120) | csasuuuuAfaUfCfCfucacucuaasasL333Z80 | 132 | 11410.764 | 11410.82 |
| A-2686452 (132) | csasuuuuAfaUfCfCfucacucuaasasL352 | 133 | 7793.702 | 7792.61 |
| A-2686450 (135) | Q410scsauuuuAfaUfCfCfucacucuaasasL352 | 134 | 8724.808 | 8724.01 |
| A-2686451 (136) | Q411scsauuuuAfaUfCfCfucacucuaasasL353 | 135 | 8724.808 | 8724.02 |
| A-4881954 (511) | ususgggcAfaAfGfGfuggaaaugasasL373Z511 | 136 | 8341.215 | 8341.75 |
| A-4881955 (512) | ususgggcAfaAfGfGfuggaaaugasasL373Z512 | 137 | 8329.204 | 8329.88 |
| A-4881956 (513) | ususgggcAfaAfGfGfuggaaaugasasL373Z513 | 138 | 8369.269 | 8369.44 |
| A-3748001 (354) | ususgggcAfaAfGfGfuggaaaugasasL354 | 139 | 10056.464 | 10055.68 |

[2995] Table 3 depicts siRNA antisense (AS) and sense strand (SS) sequences of dsRNA agents targeting Sod1 mRNA used for in vitro and/or in vivo studies to evaluate pharmacodynamic and/or pharmacologic activity of αvβ6 integrin targeting siRNA conjugates.

TABLE 3

| | | | SEQ | |
|---|---|---|---|---|
| | | | ID | |
| Duplex ID | Strand ID | Sequence 5′ to 3′ | NO | MW (Da) |
| AD-1534460 | A-2783274 (SS) | csasuuuuAfaUfCfCfucacucuaasasL333Z81 | 131 | 8873.904 |
| | A-444402 (AS) | VPusUfsuagAfgUfGfaggaUfuAfaaaugsasg | 140 | 7851.156 |
| AD-1534458 | A-2783272 (SS) | csasuuuuAfaUfCfCfucacucuaasasL333Z80 | 132 | 11410.764 |
| | A-444402 (AS) | VPusUfsuagAfgUfGfaggaUfuAfaaaugsasg | 140 | 7851.156 |
| AD-1481903 | A-2686452 (SS) | csasuuuuAfaUfCfCfucacucuaasasL352 | 133 | 7793.702 |
| | A-444402 (AS) | VPusUfsuagAfgUfGfaggaUfuAfaaaugsasg | 140 | 7851.156 |
| AD-1481901 | A-2686450 (SS) | Q410scsauuuuAfaUfCfCfucacucuaasasL352 | 134 | 8724.808 |
| | A-444402 (AS) | VPusUfsuagAfgUfGfaggaUfuAfaaaugsasg | 140 | 7851.156 |
| AD-1481902 | A-2686451 (SS) | Q411scsauuuuAfaUfCfCfucacucuaasasL353 | 135 | 8724.808 |
| | A-444402 (AS) | VPusUfsuagAfgUfGfaggaUfuAfaaaugsasg | 140 | 7851.156 |
| AD-1427062 | A-2578434 (SS) | csasuuu(Uda)AfaUfCfCfucacucuasasa | 142 | 7128.132 |
| | A-444402 (AS) | VPusUfsuagAfgUfGfaggaUfuAfaaaugsasg | 140 | 7851.156 |
| AD-2639645 | A-4881954 (SS) | ususgggcAfaAfGfGfuggaaaugasasL373Z511 | 136 | 8341.75 |
| | A-859296 (AS) | VPusUfscauUfuCfCfaccuUfuGfcccaasgsu | 141 | 7532.01 |
| AD-2639646 | A-4881955 (SS) | ususgggcAfaAfGfGfuggaaaugasasL373Z512 | 137 | 8329.88 |
| | A-859296 (AS) | VPusUfscauUfuCfCfaccuUfuGfcccaasgsu | 141 | 7532.01 |
| AD-2639647 | A-4881956 (SS) | ususgggcAfaAfGfGfuggaaaugasasL373Z513 | 138 | 8369.44 |
| | A-859296 (AS) | VPusUfscauUfuCfCfaccuUfuGfcccaasgsu | 141 | 7532.01 |
| AD-2032892 | A-3748001 (SS) | ususgggcAfaAfGfGfuggaaaugasasL354 | 139 | 10055.68 |
| | A-859296 (AS) | VPusUfscauUfuCfCfaccuUfuGfcccaasgsu | 141 | 7532.01 |

### In Vivo Study—Mouse

[2996] Female C57BL/6 mice (8-10 weeks of age) (N=3) were dosed with a single intravenous bolus injection at 2 mg/kg diluted in 1×PBS. Terminal quadriceps, heart, lungs, and liver tissues were collected on day 21 after injection. Levels of Sod1 mRNA were quantified from powdered whole tissue by RT-qPCR. Target mRNA reduction was normalized to GAPDH mRNA for each sample and reported as relative reduction compared to control animals treated with PBS alone.

mRNA Quantification by RT-qPCR

[2997] Heart and quadricep powder were homogenized and lysed in 750 μL of QIAzol Lysis Reagent for 5 minutes×2 at 25 Hz using a TissueLyser. Chloroform (150 L) was thoroughly mixed with each sample and lysates were centrifugated at full speed for 15 minutes at 4° C. Total RNA was isolated from the supernatant using the RNeasy® 96 Universal Tissue Kit. Resulting RNA (1500 ng) was used for cDNA synthesis using the Applied Biosystems™ High-Capacity cDNA Reverse Transcription Kit with RNase Inhibitor. For qPCR reactions, 2 uL cDNA was used per 10 μL reaction. RT-qPCR was performed using the LightCycler® 480 Probes Master in the LightCycler® 480 Instrument system using gene specific TaqMan assays for each target mouse-specific Sod1 (ThermoFisher Scientific, Mm01344233_g1) and Gapdh (ThermoFisher Scientific, Mm99999915_g1) were used for RT-qPCR analysis. Each sample was analyzed in duplicate by RT-qPCR. Data were analyzed using the ΔΔCt method normalizing to control animals treated with 1×PBS alone.

[2998] As depicted in FIGS. 1 and 2, intravenous administration of a single dose of the agents preferentially and potently inhibits expression of Sod1 in mouse quadriceps tissue.

### In Vivo Study—Cynomolgus Monkey

[2999] Female cynomolgus monkeys (N=3) were dosed with a single intravenous injection in the left saphenous vein at 10 mg/kg diluted in 1×PBS. Terminal skeletal tissues indicated were collected 28 days after injection. Tissues were homogenized by TissueLyser plus ball bearing (50 cycles/sec for 2 mins) in a guanidine-based lysis buffer. RNA was extracted using Qiagen's RNeasy Fibrous Tissue Mini Kit Catalog #7470, using manual columns and including a proteinase K digestion at 55° C. for 10 minutes. Levels of Sod1 mRNA were quantified from powdered whole tissue by RT-qPCR, using Invitrogen SuperScript IV VILO Master Mix, Applied Biosystems ViiA7 RT-PCR system, and Applied Biosystems TaqMan Fast Advanced Master Mix. Target mRNA reduction was normalized to PPIB mRNA for each sample and reported as relative reduction (ΔΔCT method) compared to control animals treated with PBS alone.

[3000] As depicted in FIG. 3, intravenous administration of a single dose of the agents potently inhibits expression of Sod1 in skeletal muscle tissue.

### In Vivo Study—Mouse

[3001] C57Bl/6 female mice were dosed with a single intratracheal administration of αvβ6 targeting siRNA conjugates at either 0.5 mg/kg diluted in 1×PBS or vehicle control. Terminal lung tissues were then collected 21 days after test article administration. Frozen lung tissue was powdered using liquid nitrogen in the GenoGrinder at 1250 rpm for 90 seconds. Powdered tissues were then added to Metal Bead Lysing Matrix (MP Bio, REF 6925100, lot 169952). In a fume hood, 1 mL of Qiazol (Qiagen 79306, lot #57201569) was added to each tube followed by further homogenization in the TissueLyser II (shaking at 25 Hz for 2 minutes, repeating until tissue was dissolved). Bead tubes were spun at 12,000×g for 5 minutes and Qiazol layer transferred into new tubes. In a fume hood, 200 μL of chloroform were added (Sigma Aldrich 288306) to each tube, followed by vigorous shaking for 15 seconds. Samples were centrifuged at 12,000×g for 15 minutes at 4° C. and aqueous phase then transferred to new tube. RNA was then extracted using QIAcube Connect according to manufacturer's protocol for RNeasy plus universal. Levels of mouse Sod1 mRNA (using ThermoFisher probe Mm01344233_g1) were quantified from powdered whole tissue by RT-qPCR, using Invitrogen SuperScript IV VILO Master Mix (#11756500), ThermoFisher Quantstudio 5 RT-PCR system, and TaqMan Fast Advanced Master Mix (Applied Biosystems, 4444554). Target mRNA reduction was normalized to UBC mRNA (Thermofisher probe Mm01201237 ml) for each sample and reported as relative reduction (ΔΔCT method) compared to control animals treated with PBS alone.

### In Vivo Study—Mouse

[3002] C57Bl/6 female mice were dosed with a single intranasal administration of αvβ6 targeting siRNA conjugates at either 3 or 10 mg/kg diluted in 1×PBS or vehicle control. Terminal lung tissues were then collected 21 days after test article administration. Frozen lung tissue was powdered using liquid nitrogen in the GenoGrinder at 1250 rpm for 90 seconds. Powdered tissues were then added to Metal Bead Lysing Matrix (MP Bio, REF 6925100, lot 169952,). In a fume hood, 1 mL of Qiazol (Qiagen 79306, lot #57201569) was added to each tube followed by further homogenization in the TissueLyser II (shaking at 25 Hz for 2 minutes, repeating until tissue was dissolved). Bead tubes were spun at 12,000×g for 5 minutes and Qiazol layer transferred into new tubes. In a fume hood, 200 μL of chloroform were added (Sigma Aldrich 288306) to each tube, followed by vigorous shaking for 15 seconds. Samples were centrifuged at 12,000×g for 15 minutes at 4° C. and aqueous phase then transferred to new tube. RNA was then extracted using QIAcube Connect according to manufacturer's protocol for RNeasy plus universal. Levels of mouse Sod1 mRNA (using ThermoFisher probe Mm01344233_g1) were quantified from powdered whole tissue by RT-qPCR, using Invitrogen SuperScript IV VILO Master Mix (#11756500), ThermoFisher Quantstudio 5 RT-PCR system, and TaqMan Fast Advanced Master Mix (Applied Biosystems, 4444554). Target mRNA reduction was normalized to UBC mRNA (Thermofisher probe Mm01201237 ml) for each sample and reported as relative reduction (ΔΔCT method) compared to control animals treated with PBS alone.

### In Vivo Study—Mouse

[3003] C57Bl/6 female mice were dosed with a single oropharyngeal aspiration administration of αvβ6 targeting siRNA conjugates at either 2 mg/kg diluted in 1×PBS or vehicle control. Terminal lung tissues were then collected 21 days after test article administration. Frozen lung tissue was powdered using liquid nitrogen in the GenoGrinder at 1250 rpm for 90 seconds. Powdered tissues were then added to Metal Bead Lysing Matrix (MP Bio, REF 6925100, lot 169952). In a fume hood, 1 mL of Qiazol (Qiagen 79306, lot #57201569) was added to each tube followed by further homogenization in the TissueLyser II (shaking at 25 Hz for 2 minutes, repeating until tissue was dissolved). Bead tubes were spun at 12,000×g for 5 minutes and Qiazol layer transferred into new tubes. In a fume hood, 200 μL of chloroform were added (Sigma Aldrich 288306) to each tube, followed by vigorous shaking for 15 seconds. Samples were centrifuged at 12,000×g for 15 minutes at 4° C. and aqueous phase then transferred to new tube. RNA was then extracted using QIAcube Connect according to manufacturer's protocol for RNeasy plus universal. Levels of mouse Sod1 mRNA (using ThermoFisher probe Mm01344233_g1) were quantified from powdered whole tissue by RT-qPCR, using Invitrogen SuperScript IV VILO Master Mix (#11756500), ThermoFisher Quantstudio 5 RT-PCR system, and TaqMan Fast Advanced Master Mix (Applied Biosystems, 4444554). Target mRNA reduction was normalized to UBC mRNA (Thermofisher probe Mm01201237_ml) for each sample and reported as relative reduction (ΔΔCT method) compared to control animals treated with PBS alone.

In Vivo Study—Macaca fascicularis

[3004] Female Macaca fascicularis were dosed with a single intravenous administration of αvβ6 targeting siRNA conjugates at either 5 or 10 mg/kg diluted in 1×PBS or vehicle control. Terminal lung tissues were then collected 30 days after test article administration. Frozen lung tissue was powdered using liquid nitrogen in the GenoGrinder at 1250 rpm for 90 seconds. Powdered tissues were then added to Metal Bead Lysing Matrix (MP Bio, REF 6925100, lot 169952). In a fume hood, 1 mL of Qiazol (Qiagen 79306, lot #57201569) was added to each tube followed by further homogenization in the TissueLyser II (shaking at 25 Hz for 2 minutes, repeating until tissue was dissolved). Bead tubes were spun at 12,000×g for 5 minutes and Qiazol layer transferred into new tubes. In a fume hood, 200 μL of chloroform were added (Sigma Aldrich 288306) to each tube, followed by vigorous shaking for 15 seconds. Samples were centrifuged at 12,000×g for 15 minutes at 4° C. and aqueous phase then transferred to new tube. RNA was then extracted using QIAcube Connect according to manufacturer's protocol for RNeasy plus universal. Levels of Macaca fascicularis Sod1 mRNA (using ThermoFisher probe Mf04363557 ml) were quantified from powdered whole tissue by RT-qPCR, using Invitrogen SuperScript IV VILO Master Mix (#11756500), ThermoFisher Quantstudio 5 RT-PCR system, and TaqMan Fast Advanced Master Mix (Applied Biosystems, 4444554). Target mRNA reduction was normalized to UBC mRNA (Thermofisher probe Mf02798368_ml) for each sample and reported as relative reduction (ΔΔCT method) compared to control animals treated with PBS alone.

### In Vitro Study—ELISA Displacement Assay

[3005] ELISA plates were coated with 0.6 ug/mL recombinant human LAP/TGF1b (R&D Systems 246LP025) in carbonate buffer (pH 9.6) overnight at 4 C. Plates were washed with PBST and blocked for 1 hour at room temperature with assay buffer (20 mM Tris-HCl, 150 mM NaCl, 2 mM CaCl₂, 2 mM MgCl₂, 2 mM MnCl₂, 0.5% BSA, pH 7.4). Serial dilutions of competitor compound in assay buffer were added to plate, as well as 1.0 ug/mL of purified recombinant human αvβ6 (R&D Systems 3817AV050), and samples were incubated for 1 hour at room temperature. Plates were washed with PBS-T, then incubated with 2.5 ug/mL of anti-integrin av primary antibody (Sigma MAB1978) for 1 hour at room temperature. Plates were washed with PBS-T, then incubated with 2.0 ug/mL of HRP-conjugated secondary antibody for 1 hour at room temperature. Samples were incubated with TMB substrate (Thermo 34024) for 15 minutes, reaction was quenched with 3 M sulfuric acid, and absorbance was measured at 450 nm. Percent binding inhibition was calculated by normalizing to a maximum value obtained from no-competitor samples and a minimum value obtained from no-competitor-no-integrin samples. EC50 values are reported in the following ranges: “A” EC50>100 nM; “B” EC50 10-100 nM; “C” EC50<10 nM.

TABLE 4
αvβ6 integrin binding efficiencies of duplexes
as measured by ELISA displacement assay.

| Duplex | αvβ6 EC₅₀ |
|---|---|
| AD-2032892 | C |
| AD-2639645 | A |
| AD-2639646 | B |
| AD-2639647 | C |

### Example 5: Evaluation of αvβ6 Integrin Conjugates in Mouse Lung

[3006] αvβ6 is highly restricted to a subset of epithelial cells including the epithelium lining the conducting airways and alveoli and is constitutively expressed at low levels in uninjured epithelia. Expression is markedly upregulated on epithelial cells in multiple epithelial organs, including the lung, in response to injury and acute and chronic inflammation. In addition, αvβ6 integrin is constitutively bound to TGF-α, suggesting that the system is primed to detect injurious stimuli and integrins play a role in cell migration and as such, a significant role in cancer metastasis.

[3007] Accordingly, to evaluate the effect of αvβ6 integrin conjugates in vivo, a structure-activity relationship (SAR) analysis of dsRNA agents targeting Sod1 mRNA conjugated to αvβ6 was conducted

[3008] Table 5 provides the study design used to evaluate the in vivo pharmacodynamic and/or pharmacologic activity of αvβ6 integrin targeting siRNA conjugates in mouse lung following intranasal administration.

[3009] Table 6 provides the unmodified nucleotide sequences of the antisense and sense strands of dsRNA agents targeting Sod1 mRNA used in the study and Table 7 provides the modified nucleotide sequences of the antisense and sense strands of dsRNA agents targeting Sod1 mRNA used in the study.

TABLE 5
Study Design

| | | | Route of | |
|---|---|---|---|---|
| | | | Administration | Sacrifice |
| Group | Test Article ID | Dose (mg/kg) | and Dose Day | Day |
| 1 | PBS | — | Intranasal | Day 10 |
| 2 control | AD-401824 | 1 | (50 μL total) | |
| | (+C16) | | on Day 0 | |
| 3 control | AD-463791 | | | |
| | (unconjugated) | | | |
| 4 | AD-1481899 | | | |
| 5 | AD-1481900 | | | |
| 6 | AD-1481901 | | | |
| 7 | AD-1481902 | | | |
| 8 | AD-1481903 | | | |
| 9 | AD-1481904 | | | |
| 10 control | AD-401824 | 10 | | |
| | (+C16) | | | |
| 11 control | AD-463791 | | | |
| | (unconjugated) | | | |
| 12 | AD-1481899 | | | |
| 13 | AD-1481900 | | | |
| 14 | AD-1481901 | | | |
| 15 | AD-1481902 | | | |
| 16 | AD-1481903 | | | |
| 17 | AD-1481904 | | | |

TABLE 6
Unmodified Sense and Antisense Strand Sequences of Sod1 dsRNA Agents

| | | SEQ | | | SEQ | |
|---|---|---|---|---|---|---|
| | Sense | ID | | Antisense | ID | |
| Duplex Name | Sequence 5′ to 3′ | No: | Range* | Sequence 5′ to 3′ | No: | Range* |
| AD-1481899 | CAUUUUAAUCCUCACUCUAAA | 143 | 255-275 | UUUAGAGUGAGGAUUAAAAUGAG | 144 | 253-275 |
| AD-1481900 | CAUUUUAAUCCUCACUCUAAA | 143 | 255-275 | UUUAGAGUGAGGAUUAAAAUGAG | 144 | 253-275 |
| AD-1481901 | CAUUUUAAUCCUCACUCUAAA | 143 | 255-275 | UUUAGAGUGAGGAUUAAAAUGAG | 144 | 253-275 |
| AD-1481902 | CAUUUUAAUCCUCACUCUAAA | 143 | 255-275 | UUUAGAGUGAGGAUUAAAAUGAG | 144 | 253-275 |
| AD-1481903 | CAUUUUAAUCCUCACUCUAAA | 143 | 255-275 | UUUAGAGUGAGGAUUAAAAUGAG | 144 | 253-275 |
| AD-1481904 | CAUUUUAAUCCUCACUCUAAA | 143 | 255-275 | UUUAGAGUGAGGAUUAAAAUGAG | 144 | 253-275 |
| AD-401824 | CAUUUUAAUCCUCACUCUAAA | 143 | 255-275 | UUUAGAGUGAGGAUUAAAAUGAG | 144 | 253-275 |
| AD-463791 | CAUUUUAAUCCUCACUCUAAA | 143 | 255-275 | UUUAGAGUGAGGAUUAAAAUGAG | 144 | 253-275 |

*Range in NM_000454.5

TABLE 7
Modified Sense and Antisense Strand Sequences of Sod1 dsRNA Agents

| | | SEQ | | SEQ | | SEQ |
|---|---|---|---|---|---|---|
| Duplex | Sense | ID | Antisense | ID | mRNA | ID |
| Name | Sequence 5′ to 3′ | No: | Sequence 5′ to 3′ | No: | target sequence | No: |
| AD-1481899 | csasuuuuAfaUfCfCfucac | 145 | VPusUfsuagAfgUfGfaggaUf | 153 | CUCAUUUUAAUCCUCAC | 154 |
| | ucuaasasL354 | | uAfaaaugsasg | | UCUAAG | |
| AD-1481900 | csasuuuuAfaUfCfCfucac | 146 | VPusUfsuagAfgUfGfaggaUf | 153 | CUCAUUUUAAUCCUCAC | 154 |
| | ucuaasasL355 | | uAfaaaugsasg | | UCUAAG | |
| AD-1481901 | Q410scsauuuuAfaUfCfCf | 147 | VPusUfsuagAfgUfGfaggaUf | 153 | CUCAUUUUAAUCCUCAC | 154 |
| | ucacucuaasasL352 | | uAfaaaugsasg | | UCUAAG | |
| AD-1481902 | Q411scsauuuuAfaUfCfCf | 148 | VPusUfsuagAfgUfGfaggaUf | 153 | CUCAUUUUAAUCCUCAC | 154 |
| | ucacucuaasasL353 | | uAfaaaugsasg | | UCUAAG | |
| AD-1481903 | csasuuuuAfaUfCfCfucac | 149 | VPusUfsuagAfgUfGfaggaUf | 153 | CUCAUUUUAAUCCUCAC | 154 |
| | ucuaasasL352 | | uAfaaaugsasg | | UCUAAG | |
| AD-1481904 | csasuuuuAfaUfCfCfucac | 150 | VPusUfsuagAfgUfGfaggaUf | 153 | CUCAUUUUAAUCCUCAC | 154 |
| | ucuaasasL353 | | uAfaaaugsasg | | UCUAAG | |
| AD-401824 | csasuuu(Uhd)AfaUfCfCf | 151 | VPusUfsuagAfgUfGfaggaUf | 153 | CUCAUUUUAAUCCUCAC | 154 |
| | ucacucuasasa | | uAfaaaugsasg | | UCUAAG | |
| AD-463791 | csasuuuuAfaUfCfCfucac | 152 | VPusUfsuagAfgUfGfaggaUf | 153 | CUCAUUUUAAUCCUCAC | 154 |
| | ucuasasa | | uAfaaaugsasg | | UCUAAG | |

| Duplex ID | Ligand Stereochemistry | Avidity |
|---|---|---|
| AD-1481899.1 | (R,S) | Triple |
| AD-1481900.1 | (R,R) | Triple |
| AD-1481901.1 | (R,S) | Bis 3′,5′ |
| AD-1481902.1 | (R,R) | Bis 3′,5′ |
| AD-1481903.1 | (R,S) | Mono 3′ |
| AD-1481904.1 | (R,R) | Mono 3′ |

[3010] Female mice were intranasally administered either a single 1 mg/kg or 10 mg/kg dose of the dsRNA agents conjugated to αvβ6 and at Day 10 post-dose animals were sacrificed and lung, heart, liver, and kidney tissues were collected. The level of Sod1 mRNA in the samples was determined by R^{T}-qPCR as described above. The knockdown of Sod1 mRNA in lung tissue by the αvβ6-Sod1 dsRNA agents is shown in Table 8 and FIG. 8.

TABLE 8
αvβ6 Sod1 siRNA Knockdown in Mouse Lung

| | | % Sod1 | |
|---|---|---|---|
| Dose | Test Article | Remaining | Stdev |
| | PBS | 100.0 | 10.8 |
| 1 mg/kg | AD-401824.113 | 85.1 | 9.8 |
| | AD-463791.29 | 86.9 | 33.6 |
| | AD-1481899.1 | 60.0 | 19.8 |
| | AD-1481900.1 | 63.8 | 6.7 |
| | AD-1481901.1 | 47.7 | 12.4 |
| | AD-1481902.1 | 77.2 | 2.9 |
| | AD-1481903.1 | 66.2 | 13.6 |
| | AD-1481904.1 | 59.2 | 4.0 |
| 10 mg/kg | AD-401824.113 | 55.4 | 3.2 |
| | AD-463791.29 | 60.3 | 19.2 |
| | AD-1481899.1 | 52.4 | 4.6 |
| | AD-1481900.1 | 90.1 | 21.7 |
| | AD-1481901.1 | 35.9 | 6.9 |
| | AD-1481902.1 | 51.2 | 3.6 |
| | AD-1481903.1 | 66.5 | 26.8 |
| | AD-1481904.1 | 49.8 | 6.3 |

[3011] The data demonstrate that there is a preference for (S,R) ligands over (S,S) in all conjugates except for 3′-monos (AD-1481903 (S,R) vs AD-1481904 (S,S)). In addition, the correct ligand stereochemistry improves binding by 2-3 logs. Thus, there is less activity with (S,S) ligand, not no activity. Furthermore, 3′,5′ is better than the triple (AD-1481899 vs AD-1481901 as matched pair of (S,R) stereochemistry).

TABLE 1
Abbreviations of nucleotide monomers used in nucleic acid sequence representation. It will be
understood that these monomers, when present in an oligonucleotide, are mutually linked by
3′ → 5′ phosphodiester bonds; and it is understood that when the nucleotide contains a 2′-fluoro modification,
then the fluoro replaces the hydroxy at that position in the parent nucleotide (i.e., it is a 2′-deoxy-2′-
fluoronucleotide). The abbreviations are understood to omit the 3′-phosphate (i.e. they are 3′-OH) when
placed at the 3′-terminal position of an oligonucleotide (unless the 3′-end is linked to a ligand).

| Abbv. | Nucleotide(s) |
|---|---|
| A | Adenosine-3′-phosphate |
| Ab | beta-L-adenosine-3′-phosphate |
| Abs | beta-L-adenosine-3′-phosphorothioate |
| Af | 2′-fluoroadenosine-3′-phosphate |
| Afs | 2′-fluoroadenosine-3′-phosphorothioate |
| As | adenosine-3′-phosphorothioate |
| C | cytidine-3′-phosphate |
| Cb | beta-L-cytidine-3′-phosphate |
| Cbs | beta-L-cytidine-3′-phosphorothioate |
| Cf | 2′-fluorocytidine-3′-phosphate |
| Cfs | 2′-fluorocytidine-3′-phosphorothioate |
| Cs | cytidine-3′-phosphorothioate |
| G | guanosine-3′-phosphate |
| Gb | beta-L-guanosine-3′-phosphate |
| Gbs | beta-L-guanosine-3′-phosphorothioate |
| Gf | 2′-fluoroguanosine-3′-phosphate |
| Gfs | 2′-fluoroguanosine-3′-phosphorothioate |
| Gs | guanosine-3′-phosphorothioate |
| T | 5′-methyluridine-3′-phosphate |
| Tf | 2′-fluoro-5-methyluridine-3′-phosphate |
| Tfs | 2′-fluoro-5-methyluridine-3′-phosphorothioate |
| Ts | 5-methyluridine-3′-phosphorothioate |
| U | Uridine-3′-phosphate |
| Uf | 2′-fluorouridine-3′-phosphate |
| Ufs | 2′-fluorouridine-3′-phosphorothioate |
| Us | uridine-3′-phosphorothioate |
| N | any nucleotide, modified or unmodified |
| a | 2′-O-methyladenosine-3′-phosphate |
| as | 2′-O-methyladenosine-3′-phosphorothioate |
| c | 2′-O-methylcytidine-3′-phosphate |
| cs | 2′-O-methylcytidine-3′-phosphorothioate |
| g | 2′-O-methylguanosine-3′-phosphate |
| gs | 2′-O-methylguanosine-3′-phosphorothioate |
| t | 2′-O-methyl-5-methyluridine-3′-phosphate |
| ts | 2′-O-methyl-5-methyluridine-3′-phosphorothioate |
| u | 2′-O-methyluridine-3′-phosphate |
| us | 2′-O-methyluridine-3′-phosphorothioate |
| s | phosphorothioate linkage |
| Y34 | 2-O-methyl-1-deoxyribofuranose 3-phosphate (abasic 2′-OMe furanose) |
| | [chemical structure] |
| Y44 | inverted abasic DNA (1,2-dideoxyribofuranose 5-phosphate) |
| | [chemical structure] |
| (Agn) | Adenosine-glycol nucleic acid (GNA) S-Isomer |
| (Cgn) | Cytidine-glycol nucleic acid (GNA) S-Isomer |
| (Ggn) | Guanosine-glycol nucleic acid (GNA) S-Isomer |
| (Tgn) | Thymidine-glycol nucleic acid (GNA) S-Isomer |
| P | Phosphate |
| VP | Vinyl-phosphonate |
| dA | 2′-deoxyadenosine-3′-phosphate |
| dAs | 2′-deoxyadenosine-3′-phosphorothioate |
| dC | 2′-deoxycytidine-3-phosphate |
| dCs | 2′-deoxycytidine-3-phosphorothioate |
| dG | 2′-deoxyguanosine-3-phosphate |
| dGs | 2′-deoxyguanosine-3′-phosphorothioate |
| dT | 2′-deoxythimidine-3′-phosphate |
| dTs | 2′-deoxythimidine-3′-phosphorothioate |
| dU | 2′-deoxyuridine |
| dUs | 2′-deoxyuridine-3′-phosphorothioate |
| (C2p) | cytidine-2′-phosphate |
| (G2p) | guanosine-2′-phosphate |
| (U2p) | uridine-2′-phosphate |
| (A2p) | adenosine-2′-phosphate |
| (Ahd) | 2′-O-hexadecyl-adenosine-3′-phosphate |
| (Ahds) | 2′-O-hexadecyl-adenosine-3′-phosphorothioate |
| (Chd) | 2′-O-hexadecyl-cytidine-3′-phosphate |
| | [chemical structure] |
| (Chds) | 2′-O-hexadecyl-cytidine-3′-phosphorothioate |
| (Ghd) | 2′-O-hexadecyl-guanosine-3′-phosphate |
| (Ghds) | 2′-O-hexadecyl-guanosine-3′-phosphorothioate |
| (Uhd) | 2′-O-hexadecyl-uridine-3′-phosphate |
| (Uhds) | 2′-O-hexadecyl-uridine-3′-phosphorothioate |
| (Ada) | 2′-O-docosyladenosine 3′-phosphate |
| | [chemical structure] |
| (Cda) | 2′-O-docosylcytidine 3′-phosphate |
| | [chemical structure] |
| (Gda) | 2′-O-docosylguanosine 3′-phosphate |
| | [chemical structure] |
| (Uda) | 2′-O-docosyluridine 3′-phosphate |
| | [chemical structure] |
| L333 | [chemical structure] |
| | 1-(6-(6-(dibenzo[b,f]azacyclooct-4-yn-5-yl)-6-oxohexan-1-oylamino)hexan-1-oyl)-4R- |
| | hydroxy-2S-hydroxymethylpyrrolidine |
| L333 Z### | [chemical structure] |
| | (1-(6-(6-(dibenzo[b,f]azacyclooct-4-yn-5-yl)-6-oxohexan-1-oylamino)hexan-1-oyl)-4R- |
| | hydroxypyrrolidin-2S-yl)methyl ester, click conjugate triazole formed between the |
| | dibenzoazacyclooctyne group and the azide group of Z### |
| L333Z80 | [chemical structure] |
| | 1-(6-(6-(dibenzo[b,f]azacyclooct-4-yn-5-yl)-6-oxohexan-1-oylamino)hexan-1-oyl)-4R- |
| | hydroxy-2S-hydroxymethylpyrrolidine, click conjugate triazole formed between the |
| | dibenzoazacyclooctyne group and the azide group of Z80 (SEQ ID NO: 155) |
| L333Z81 | [chemical structure] |
| | 1-(6-(6-(dibenzo[b,f]azacyclooct-4-yn-5-yl)-6-oxohexan-1-oylamino)hexan-1-oyl)-4R- |
| | hydroxy-2S-hydroxymethylpyrrolidine, click conjugate triazole formed between the |
| | dibenzoazacyclooctyne group and the azide group of Z81 (SEQ ID NO: 156) |
| L352 | [chemical structure] |
| | (S)-3-(3-(3,5-dimethyl-1H-pyrazol-1-yl)-5-(4-(5-((6-((2S,4R)-4-hydroxy-2- |
| | (hydroxymethyl)pyrrolidin-1-yl)-6-oxohexyl)amino)-5-oxopentanoyl)piperazin-1- |
| | yl)phenyl)-4-((R)-3-(2-(5,6,7,8-tetrahydro-1,8-naphthyridin-2-yl)ethyl)pyrrolidin-1- |
| | yl)butanoic acid |
| L353 | [chemical structure] |
| | (R)-3-(3-(3,5-dimethyl-1H-pyrazol-1-yl)-5-(4-(5-((6-((2S,4R)-4-hydroxy-2- |
| | (hydroxymethyl)pyrrolidin-1-yl)-6-oxohexyl)amino)-5-oxopentanoyl)piperazin-1- |
| | yl)phenyl)-4-((R)-3-(2-(5,6,7,8-tetrahydro-1,8-naphthyridin-2-yl)ethyl)pyrrolidin-1- |
| | yl)butanoic acid |
| L354 | [chemical structure] |
| | (2S,4R)-1-[23-((5-(4-(3-((S)-1-carboxy-3-((R)-3-(2-(5,6,7,8-tetrahydro-1,8-naphthyridin-2- |
| | yl)ethyl)pyrrolidin-1-yl)propan-2-yl)-5-(3,5-dimethyl-1H-pyrazol-1-yl)phenyl)piperazin-1- |
| | yl)-5-oxopentan-1-oyl)amino)-14,14-bis[3-(3-((5-(4-(3-((S)-1-carboxy-3-((R)-3-(2- |
| | (5,6,7,8-tetrahydro-1,8-naphthyridin-2-yl)ethyl)pyrrolidin-1-yl)propan-2-yl)-5-(3,5- |
| | dimethyl-1H-pyrazol-1-yl)phenyl)piperazin-1-yl)-5-oxopentan-1-oyl)amino)propylamino)- |
| | 3-oxo-propoxymethyl]-1,12,19-trioxo-16-oxa-13,20-diazatricos-1-yl]-4-hydroxy-2- |
| | hydroxymethylpyrrolidine |
| L355 | [chemical structure] |
| | (2S,4R)-1-[23-((5-(4-(3-((R)-1-carboxy-3-((R)-3-(2-(5,6,7,8-tetrahydro-1,8-naphthyridin- |
| | 2-yl)ethyl)pyrrolidin-1-yl)propan-2-yl)-5-(3,5-dimethyl-1H-pyrazol-1-yl)phenyl)piperazin- |
| | 1-yl)-5-oxopentan-1-oyl)amino)-14,14-bis[3-(3-((5-(4-(3-((R)-1-carboxy-3-((R)-3-(2- |
| | (5,6,7,8-tetrahydro-1,8-naphthyridin-2-yl)ethyl)pyrrolidin-1-yl)propan-2-yl)-5-(3,5- |
| | dimethyl-1H-pyrazol-1-yl)phenyl)piperazin-1-yl)-5-oxopentan-1-oyl)amino)propylamino)- |
| | 3-oxo-propoxymethyl]-1,12,19-trioxo-16-oxa-13,20-diazatricos-1-yl]-4-hydroxy-2- |
| | hydroxymethylpyrrolidine |
| L373 Z### | [chemical structure] |
| | ((2S,4R)-(1-(6-(((1R,8S,9S)-bicyclo[6.1.0]non-4-yn-9-ylmethoxy)carbonylamino)hexan-1- |
| | oyl)-4-hydroxypyrrolidin-2-yl)methyl)ester, click conjugate triazole formed between the |
| | cyclooctyne group and the azide group of Z### |
| L373Z511 | [chemical structure] |
| | ((2S,4R)-(1-(6-(((1R,8S,9S)-bicyclo[6.1.0]non-4-yn-9-ylmethoxy)carbonylamino)hexan-1- |
| | oyl)-4-hydroxypyrrolidin-2-yl)methyl)ester, click conjugate triazole formed between the |
| | cyclooctyne group and the azide group of Z511 |
| L373Z512 | [chemical structure] |
| | ((2S,4R)-(1-(6-(((1R,8S,9S)-bicyclo[6.1.0]non-4-yn-9-ylmethoxy)carbonylamino)hexan-1- |
| | oyl)-4-hydroxypyrrolidin-2-yl)methyl)ester, click conjugate triazole formed between the |
| | cyclooctyne group and the azide group of Z512 |
| L373Z513 | [chemical structure] |
| | ((2S,4R)-(1-(6-(((1R,8S,9S)-bicyclo[6.1.0]non-4-yn-9-ylmethoxy)carbonylamino)hexan-1- |
| | oyl)-4-hydroxypyrrolidin-2-yl)methyl)ester, click conjugate triazole formed between the |
| | cyclooctyne group and the azide group of Z513 |
| Q410s | [chemical structure] |
| | 1-(6-((5-(4-(3-(3,5-dimethyl-1H-pyrazol-1-yl)-5-((S)-3-carboxy-1-((R)-3-(2-(5,6,7,8- |
| | tetrahydro-1,8-naphthyridin-2-yl)ethyl)pyrrolidin-1-yl)propan-2-yl)phenyl)piperazin-1-yl)- |
| | 5-oxopentanoyl)amino)hexan-1-oyl)-3S-hydroxy-pyrrolidine 3-phosphorothioate |
| Q411s | [chemical structure] |
| | 1-(6-((5-(4-(3-(3,5-dimethyl-1H-pyrazol-1-yl)-5-((R)-3-carboxy-1-((R)-3-(2-(5,6,7,8- |
| | tetrahydro-1,8-naphthyridin-2-yl)ethyl)pyrrolidin-1-yl)propan-2-yl)phenyl)piperazin-1-yl)- |
| | 5-oxopentanoyl)amino)hexan-1-oyl)-3S-hydroxy-pyrrolidine 3-phosphorothioate |
| Z80 | [chemical structure] |
| | 6-azidohexan-1-oyl-GCILNGRTDLGTLLFRCRRDSDCPGACICRGNGYCG-NH₂ |
| | (SEQ ID NO: 121) where disulfide bonds exist between C2-C27, C17-C29, C23-C35 |
| Z81 | [chemical structure] |
| | cyclo(N-MeK)GPGRGDQTTLA) wherein the lysine amino residue formes an amide with |
| | 22-azido-17-oxo-4,7,10,13-tetraoxa-16-aza-docosanoic acid (SEQ ID NO: 122) |
| Z511 | [chemical structure] |
| | (S)-3-(3-(4-(5-azidopentanoyl)piperazin-1-yl)-5-(3,5-dimethyl-1H-pyrazol-1-yl)phenyl)-4- |
| | ((R)-3-(((5,6,7,8-tetrahydro-1,8-naphthyridin-2-yl)oxy)methyl)pyrrolidin-1-yl)butanoic |
| | acid |
| Z512 | [chemical structure] |
| | (S)-4-((R)-3-(2-(6-amino-5-methoxypyridin-2-yl)ethyl)pyrrolidin-1-yl)-3-(3-(4-(5- |
| | azidopentanoyl)piperazin-1-yl)-5-(3,5-dimethyl-1H-pyrazol-1-yl)phenyl)butanoic acid |
| Z513 | [chemical structure] |
| | (S)-3-(3-(4-(5-azidopentanoyl)piperazin-1-yl)-5-(3,5-dimethyl-1H-pyrazol-1-yl)phenyl)-4- |
| | ((R)-3-(2-(4-methoxy-5,6,7,8-tetrahydro-1,8-naphthyridin-2-yl)ethyl)pyrrolidin-1- |
| | yl)butanoic acid |

The application's sequence listing, which the Patent Office published only in electronic form, follows.

SEQUENCE LISTING (454 sequences)

SEQ ID NO: 1 - RNA, 3039 nt, Homo sapiens
  source 1..3039: mol_type = mRNA
agaaacatgctgaagtcccggcggctcttccagcagcggcagcggctccagcagcagcggcggcggcggcggcggcggcagcggcagcgacagcgctcggctcctgcgggaaaggcgcccggcgcccatgcctccggccccgcgccgcggctgccctgacccggccgcgacctccctctgcgcaccacgccgcccgggcttctggggtgttccccaaccacggcccagccctgccacaccccccgcccccggcctccgcagctcggcatgggcgcgggggtgctcgtcctgggcgcctccgagcccggtaacctgtcgtcggccgcaccgctccccgacggcgcggccaccgcggcgcggctgctggtgcccgcgtcgccgcccgcctcgttgctgcctcccgccagcgaaagccccgagccgctgtctcagcagtggacagcgggcatgggtctgctgatggcgctcatcgtgctgctcatcgtggcgggcaatgtgctggtgatcgtggccatcgccaagacgccgcggctgcagacgctcaccaacctcttcatcatgtccctggccagcgccgacctggtcatggggctgctggtggtgccgttcggggccaccatcgtggtgtggggccgctgggagtacggctccttcttctgcgagctgtggacctcagtggacgtgctgtgcgtgacggccagcatcgagaccctgtgtgtcattgccctggaccgctacctcgccatcacctcgcccttccgctaccagagcctgctgacgcgcgcgcgggcgcggggcctcgtgtgcaccgtgtgggccatctcggccctggtgtccttcctgcccatcctcatgcactggtggcgggcggagagcgacgaggcgcgccgctgctacaacgaccccaagtgctgcgacttcgtcaccaaccgggcctacgccatcgcctcgtccgtagtctccttctacgtgcccctgtgcatcatggccttcgtgtacctgcgggtgttccgcgaggcccagaagcaggtgaagaagatcgacagctgcgagcgccgtttcctcggcggcccagcgcggccgccctcgccctcgccctcgcccgtccccgcgcccgcgccgccgcccggacccccgcgccccgccgccgccgccgccaccgccccgctggccaacgggcgtgcgggtaagcggcggccctcgcgcctcgtggccctgcgcgagcagaaggcgctcaagacgctgggcatcatcatgggcgtcttcacgctctgctggctgcccttcttcctggccaacgtggtgaaggccttccaccgcgagctggtgcccgaccgcctcttcgtcttcttcaactggctgggctacgccaactcggccttcaaccccatcatctactgccgcagccccgacttccgcaaggccttccagggactgctctgctgcgcgcgcagggctgcccgccggcgccacgcgacccacggagaccggccgcgcgcctcgggctgtctggcccggcccggacccccgccatcgcccggggccgcctcggacgacgacgacgacgatgtcgtcggggccacgccgcccgcgcgcctgctggagccctgggccggctgcaacggcggggcggcggcggacagcgactcgagcctggacgagccgtgccgccccggcttcgcctcggaatccaaggtgtagggcccggcgcggggcgcggactccgggcacggcttcccaggggaacgaggagatctgtgtttacttaagaccgatagcaggtgaactcgaagcccacaatcctcgtctgaatcatccgaggcaaagagaaaagccacggaccgttgcacaaaaaggaaagtttgggaagggatgggagagtggcttgctgatgttccttgttgttttttttttcttttcttttctttcttcttcttttttttttttttttttttttctgtttgtggtccggccttcttttgtgtgtgcgtgtgatgcatctttagatttttttcccccaccaggtggtttttgacactctctgagaggaccggagtggaagatgggtgggttaggggaagggagaagcattaggaggggattaaaatcgatcatcgtggctcccatccctttcccgggaacaggaacacactaccagccagagagaggagaatgacagtttgtcaagacatatttccttttgctttccagagaaatttcattttaatttctaagtaatgatttctgctgttatgaaagcaaagagaaaggatggaggcaaaataaaaaaaaatcacgtttcaagaaatgttaagctcttcttggaacaagccccaccttgctttccttgtgtagggcaaacccgctgtcccccgcgcgcctgggtggtcaggctgagggatttctacctcacactgtgcatttgcacagcagatagaaagacttgtttatattaaacagcttatttatgtatcaatattagttggaaggaccaggcgcagagcctctctctgtgacatgtgactctgtcaattgaagacaggacattaaaagagagcgagagagagaaacagttcagattactgcacatgtggataaaaacaaaaacaaaaaaaaggagtggttcaaaatgccatttttgcacagtgttaggaattacaaaatccacagaagatgttacttgcacaaaaagaaattaaatattttttaaagggagaggggctgggcagatcttaaataaaattcaaactctacttctgttgtctagtatgttattgagctaatgattcattgggaaaatacctttttatactcctttatcatggtactgtaactgtatccatattataaatataattatcttaaggattttttatttttttttatgtccaagtgcccacgtgaatttgctggtgaaagttagcacttgtgtgtaaattctacttcctcttgtgtgttttaccaagtatttatactctggtgcaactaactactgtgtgaggaattggtccatgtgcaataaataccaatgaagcacaa

SEQ ID NO: 2 - RNA, 3034 nt, Mus musculus
  source 1..3034: mol_type = mRNA
agaaacatgctgaggtcccggcggctcttccagcagcgacagcggctccagcagcagcggcggcggcggcggcggagacagcgctcggctacggaggagaaggcgcccggcgtccatgcctccggccccgagccgcggctgccctgacctggccgcgacctccccgcgcgggccccgcagccccggctcctggggtgctccccaggcgcggcccagccccgccacaccccccgcccccggcctccgcagctcggcatgggcgcgggggcgctcgccctgggcgcctccgaaccctgcaacctgtcgtccgccgcgccgctgcccgacggtgcggccaccgcggcgcggctgctggtgctcgcgtcgcctcccgcctcgctgctgcctccagccagcgagggctcagcgccgctgtcgcagcagtggaccgcgggtatgggcctactgctggcgctcatcgttctgctcatcgtggtgggtaacgtgctggtgatcgtggccatcgccaagaccccgcggctgcagacgctcaccaacctcttcatcatgtccctggccagcgctgatctggtcatgggattgctggtggtgcctttcggggccaccatcgtggtgtggggccgctgggagtacggctccttcttctgcgagctctggacttcggtagatgtgctgtgtgtgacggccagcattgagaccctgtgtgtcatcgccctggaccgctacctcgccatcacgtcgccctttcgctaccagagtttgctgacgcgcgcgcgagcgcgggccctcgtgtgcacagtgtgggccatctcggcgttggtgtccttcctgcccatcctcatgcactggtggcgggccgagagcgacgaagcgcgccgctgctacaacgaccccaagtgctgcgatttcgtcaccaacagggcctacgccatcgcctcgtccgtcgtctccttctacgtgcccctgtgcatcatggccttcgtgtacctgcgggtgttccgcgaggcccaaaaacaggtaaagaagatcgacagctgcgagcgccgcttcctcggcggcccagcccggccgccctcgcctgagccctcgccgtcacctgggccaccgcgccccgcagactcgctggccaacgggcgctccagcaagcggcggccgtcgcgcctcgtggctctgcgcgagcagaaggcgctcaagacactgggcatcatcatgggtgtgttcacgctctgctggctgcccttcttcctggccaacgtggtgaaggctttccaccgcgacctggtgccggatcgcctcttcgtcttcttcaactggctgggctacgccaactcggccttcaaccccatcatctactgccgcagccccgacttccgcaaggctttccagcgcctgctctgctgcgcgcgccgggccgcctgcagacgccgcgcagcccacggggaccggccgcgcgcctccggctgcctggcgagagctgggccgccgccgtcccccggagctccctcggacgacgacgacgacgacgccgggaccaccccaccggcgcgcctgctggagccctggaccggctgcaacggcgggacaaccactgtggacagcgattcgagcctggacgagccggggcgccagggcttctcctcggagtccaaggtgtagagagccaggctctctgggcgcacggacgccgctccccatagtcccgggctggacacgggctctgcatccctagaggaagagagcccgcctgggcgcccctgagccgctccccaggggagagaggagatctctgtttactcaagaccgaaagcaggtgaatgcaaagcccacagatctatcgaatcatccgagacgtacagaaaagccccggaccgagcgtttgcgcaaaaaggaaagtttaggaggagttgggagagtgtggcttagtatggcttactggcttgtcttgagttcctttctctctgaggttcggcctttcgtgtgtttaatgcaccttcaggcattcccccccccccccgcccctaggtgggttttgacactttctgcaaggacccgagtggaaactaggcggggaggggagggggcaggatggagtctatcacctggctttccggttccacacctaggaacctaagtattcagctcaggtttggtgtgggggcggggccggtgataattagccaggaagtgtttccctttgctttctaaagaaattgcatactaattccggagtactggtgtctcctgttcttaaagcaaagggaaaagaaggatgcgaaacagacaaatctggtttcgagaaactatgtgtggagcacggttcaccttgctttctcctagagggcaaaccttgtgccctgcgcgcctcggtggtcctgctgtgggtcctctacctcactctgtgcatattgcacagcaagatagaaagacttgtttatattaaacagcttatttatgtatcaatactagttggaaggaccaggcgctgagtctctctctgtgacatgtgactctgtcaactaaagataggacagaacaaaaaggaaacagttgagattattgcacatgtggctaaaaacaaagacggcaaaaaaaaaaaaaaaaggcagtggttggaaggccattttgcacagtgttaggcattgtaaaattcatagaagttgttaacttgcacaaaaaaaattaaatatttttactgggatggggaggtgggcagatctttaaaaagctaaaataaaattcaaactcagtttctcttgtctattatgttattgagttgatggtttattgggaagttactttttatactcttatcatggtactgtaactgtatccatattataaatattattctcttacgtatttttattattattttttaatgtccaagtgcccccgtgaatctgctggtaaaatttagcactcgtgtgtatattctatctcttcttgtgtgtgtgaccaagtatttatactctggtgcaactaactaccgtgtgggaattggtccatgtgcaataaagacagcagtgcagctcaa

SEQ ID NO: 3 - RNA, 1401 nt, Rattus norvegicus
  source 1..1401: mol_type = mRNA
atgggcgcgggggcgctcgccctgggcgcctccgaaccctgcaacctgtcgtcggccgcgccgctgcccgacggcgcggccaccgcggcacgactgctggtgctcgcgtcgcctcccgcctcgctgctgcctccagccagcgagggctcagcgccgctgtcgcagcagtggaccgcgggtatgggcctactcctggcgctcatcgtgctgctcatcgtagtgggcaacgtgttggtgatcgtggccatcgccaagaccccgcggctgcagacgctcaccaacctcttcatcatgtccctggccagcgccgatctggtcatgggactgctggtggtgcctttcggggccaccattgtggtgtggggccgctgggagtacggctccttcttctgtgagctctggacttcggtagacgtgctatgtgtgacggccagcatcgagaccctgtgtgtcatcgccctggaccgctacctcgccatcacgctgccctttcgctaccagagcctgctgacgcgcgcgcgagcgcgggccctcgtgtgcacagtgtgggccatctccgcgctggtgtccttcctgcccatcctcatgcactggtggcgggccgagagcgacgaagcgcgccgctgctacaacgaccccaagtgctgcgatttcgtcaccaaccgggcctacgccatcgcctcgtccgtcgtctccttctacgtgcccctgtgcatcatggccttcgtgtacctccgggtgttccgcgaggcccagaaacaggtgaagaagatcgacagctgcgagcgccgcttcctcacgggcccgccccggccgccctcgcccgcgccctcgccatcaccagggccaccgcgccccgcagactcgctggccaacgggcgctccagcaagcggcggccgtcgcgcctcgtggctctgcgagagcagaaggcgctcaagacactgggcatcatcatgggtgtgttcacgctctgctggctgcccttcttcctggccaacgtggtgaaagctttccaccgcgacctggtgccggatcgcctcttcgtcttcttcaactggctgggctacgccaactcggccttcaaccccatcatctactgccgcagccccgacttccgcaaggctttccagcgcctgctttgctgcgcgcgccgggccgcctgcagacgccgcgcagcccacggggaccggccgcgcgcctcgggctgcctggcgagagctgggccgccgccgtcccccggggctccttcggacgacgacgacgatgacgccggggccaccccacccgcgcgcctgttggagccctgggccggctgcaacggcgggacgaccactgtggacagcgattcgagcctggacgagccgggacgccagggcttctcctccgagtccaaggtgtag

SEQ ID NO: 4 - RNA, 2891 nt, Macaca mulatta
  source 1..2891: mol_type = mRNA
gcaccccgccgtccaggcttctggggtgttccccaaccaaggcccagccctgccacaccccccgcctccggcctccgcaactcggcatgggcgcgggggcgctcgtcctgggcgcctccgagcccggtaacctgtcgtcggccgcaccgctccccgacggcgtggccaccgcggcgcggctgctggtgcccgcgtcgccgcccgcctcgttgctgcctcccgccagcgaaggccccgagccgctgtcgcagcagtggacggcgggcatgggtctgctgatggcgctcatcgtgctgctcatcgtggcgggcaacgtgctggtgatcgtggccatcgccaagacgccgcggctgcagacgctcaccaacctcttcatcatgtccctggccagcgccgacctggtcatggggctgctggtggtgccgttcggggccaccatcgtggtgtggggccgctgggagtacggctccttcttctgcgagctgtggacctcggtggacgtgctgtgcgtgacggccagcatcgagaccctgtgtgtcatcgccctggaccgctacctcgccatcacctcgcccttccgctaccagagcctgctgacgcgcgcgcgggcgcggggcctcgtgtgcaccgtgtgggccatctcagccctggtgtccttcctgcccatcctcatgcattggtggcgggcggagagcgacgaggcgcgccgctgctacaacgaccccaagtgctgcgatttcgtcaccaaccgggcctacgccatcgcctcgtccgtggtctccttctacgtgcccctgtgcatcatggccttcgtgtacctgcgggtgttccgcgaggcccagaagcaggtgaagaagatcgacagctgcgagcgccgtttcctcggcggccccgcgcggccgccctcgccctcgccctcgccctcgccctcgccggtccccgcgccgccgcccggacctccgcgccccgccgccgccgctgccaccaccgccccgctggtcaacggacgtgcgggtaagcggcggccctcgcgcctcgtggccctgcgcgagcagaaggcgctcaagacgctgggcatcatcatgggcgtgttcacgctctgttggctgcccttcttcctggccaacgtggtgaaggccttccaccgcgagctggtgcccgaccgcctcttcgtcttcttcaactggctgggctacgccaactcggccttcaaccccatcatctactgccgcagccccgacttccgcaacgccttccagcgactgctctgctgcgcgcgcagggctgcccgccggcgccacgcggcccacggagaccggccgcgcgcctcgggctgtctggcccggcccggacccccgccgtcgcccggggccgcctcggacgacgacgacgacgatgtcgtcggggccacgcagcccgcgcgcctgctggagccctgggccggctgcaacggcggggcggcggcggacagcgactcgagcctggacgagccgtgccgccccggattcgcctcggagtccaaggtgtagggcccggcgccgggcgaggacgccgggcaccccgggaggaggagagcccgggcgccccggaacgacttcccgggggaacgaggagatctgtgtttactcaagaccgaaagcaggtgaactcgaagcccacaatcctcgtctgaatcatccgaggcaaacagaaaagccacggaccattgcacaaaaaggaaagtttggggagggatgggagagtggcttgctgatgttccttggttttttttctttctttcttcctttttttttttttttttctgtttgtggtccggccttcttttgtatgtgcgtgtgatgcatctttagattttttttcccccacgttggtttttgacactctctgcgaggaccggagtggaagttgggtgggttacgggaaggaagaagcattaggaggggattaaaatcgatcagcgtggctcctatccctttcccaggaacaggagcagtctaccagccagagggaggagaatgacagtttgtcaagacgtatttcttttgctttccagataaatttcattttaatttctaagtaatgagttctgctgtcatgaaagcaaagagaaaggatggaggcaaaaaaaaaaaaattcacgtttcaagaaatgttaagctcttcttggaacaagccccaccttgctttccttgtgtagggcaaaccggccgtcccccgcgcgcctgggtggtcaggctgagggatttctacctcacactgtgcgtttgcacagcagatagaacgacttgtttatattaaacagcttatttatgtatcaatattagttggaaggaccaggcgcagagcctctctctgtgacatgtgactctgtcaattgaagacaggacattagagagagagaaacagttcagattactgcacatgtggataaaaacaaaaacaacaaaaaaaggagtggttcaaaatgccatttttgcacagtgttaggaattacaaagtccacaggagatgttacttgcacaaaaagaaattaaatattttttaaagggggaggggctgggcagatcttaaaaactaaaataaaattcaaactctacttctgttgtctagtatgttattgagctaatgatttattggggaaaatacctttttatactcctttatcatggtactgtaactgtatccatattataaatataattatcttaaggattttttatttttttttttttatgtccaagtgcccacgtgaatttgctggtgaaagttagcacttgtgtgtgaactctacttcctcttgtgtgttttaccaagtatttatactctggtgcaactaactactgtgtgaggaattggtccatgtgcaataaataccaatgaagcacaatcaa

SEQ ID NO: 5 - RNA, 3039 nt, Homo sapiens
  source 1..3039: mol_type = mRNA
ttgtgcttcattggtatttattgcacatggaccaattcctcacacagtagttagttgcaccagagtataaatacttggtaaaacacacaagaggaagtagaatttacacacaagtgctaactttcaccagcaaattcacgtgggcacttggacataaaaaaaaataaaaaatccttaagataattatatttataatatggatacagttacagtaccatgataaaggagtataaaaaggtattttcccaatgaatcattagctcaataacatactagacaacagaagtagagtttgaattttatttaagatctgcccagcccctctccctttaaaaaatatttaatttctttttgtgcaagtaacatcttctgtggattttgtaattcctaacactgtgcaaaaatggcattttgaaccactccttttttttgtttttgtttttatccacatgtgcagtaatctgaactgtttctctctctcgctctcttttaatgtcctgtcttcaattgacagagtcacatgtcacagagagaggctctgcgcctggtccttccaactaatattgatacataaataagctgtttaatataaacaagtctttctatctgctgtgcaaatgcacagtgtgaggtagaaatccctcagcctgaccacccaggcgcgcgggggacagcgggtttgccctacacaaggaaagcaaggtggggcttgttccaagaagagcttaacatttcttgaaacgtgatttttttttattttgcctccatcctttctctttgctttcataacagcagaaatcattacttagaaattaaaatgaaatttctctggaaagcaaaaggaaatatgtcttgacaaactgtcattctcctctctctggctggtagtgtgttcctgttcccgggaaagggatgggagccacgatgatcgattttaatcccctcctaatgcttctcccttcccctaacccacccatcttccactccggtcctctcagagagtgtcaaaaaccacctggtgggggaaaaaaatctaaagatgcatcacacgcacacacaaaagaaggccggaccacaaacagaaaaaaaaaaaaaaaaaaaaaagaagaagaaagaaaagaaaagaaaaaaaaaacaacaaggaacatcagcaagccactctcccatcccttcccaaactttcctttttgtgcaacggtccgtggcttttctctttgcctcggatgattcagacgaggattgtgggcttcgagttcacctgctatcggtcttaagtaaacacagatctcctcgttcccctgggaagccgtgcccggagtccgcgccccgcgccgggccctacaccttggattccgaggcgaagccggggcggcacggctcgtccaggctcgagtcgctgtccgccgccgccccgccgttgcagccggcccagggctccagcaggcgcgcgggcggcgtggccccgacgacatcgtcgtcgtcgtcgtccgaggcggccccgggcgatggcgggggtccgggccgggccagacagcccgaggcgcgcggccggtctccgtgggtcgcgtggcgccggcgggcagccctgcgcgcgcagcagagcagtccctggaaggccttgcggaagtcggggctgcggcagtagatgatggggttgaaggccgagttggcgtagcccagccagttgaagaagacgaagaggcggtcgggcaccagctcgcggtggaaggccttcaccacgttggccaggaagaagggcagccagcagagcgtgaagacgcccatgatgatgcccagcgtcttgagcgccttctgctcgcgcagggccacgaggcgcgagggccgccgcttacccgcacgcccgttggccagcggggcggtggcggcggcggcggcggggcgcgggggtccgggcggcggcgcgggcgcggggacgggcgagggcgagggcgagggcggccgcgctgggccgccgaggaaacggcgctcgcagctgtcgatcttcttcacctgcttctgggcctcgcggaacacccgcaggtacacgaaggccatgatgcacaggggcacgtagaaggagactacggacgaggcgatggcgtaggcccggttggtgacgaagtcgcagcacttggggtcgttgtagcagcggcgcgcctcgtcgctctccgcccgccaccagtgcatgaggatgggcaggaaggacaccagggccgagatggcccacacggtgcacacgaggccccgcgcccgcgcgcgcgtcagcaggctctggtagcggaagggcgaggtgatggcgaggtagcggtccagggcaatgacacacagggtctcgatgctggccgtcacgcacagcacgtccactgaggtccacagctcgcagaagaaggagccgtactcccagcggccccacaccacgatggtggccccgaacggcaccaccagcagccccatgaccaggtcggcgctggccagggacatgatgaagaggttggtgagcgtctgcagccgcggcgtcttggcgatggccacgatcaccagcacattgcccgccacgatgagcagcacgatgagcgccatcagcagacccatgcccgctgtccactgctgagacagcggctcggggctttcgctggcgggaggcagcaacgaggcgggcggcgacgcgggcaccagcagccgcgccgcggtggccgcgccgtcggggagcggtgcggccgacgacaggttaccgggctcggaggcgcccaggacgagcacccccgcgcccatgccgagctgcggaggccgggggcggggggtgtggcagggctgggccgtggttggggaacaccccagaagcccgggcggcgtggtgcgcagagggaggtcgcggccgggtcagggcagccgcggcgcggggccggaggcatgggcgccgggcgcctttcccgcaggagccgagcgctgtcgctgccgctgccgccgccgccgccgccgccgctgctgctggagccgctgccgctgctggaagagccgccgggacttcagcatgtttct

SEQ ID NO: 6 - RNA, 3034 nt, Mus musculus
  source 1..3034: mol_type = mRNA
ttgagctgcactgctgtctttattgcacatggaccaattcccacacggtagttagttgcaccagagtataaatacttggtcacacacacaagaagagatagaatatacacacgagtgctaaattttaccagcagattcacgggggcacttggacattaaaaaataataataaaaatacgtaagagaataatatttataatatggatacagttacagtaccatgataagagtataaaaagtaacttcccaataaaccatcaactcaataacataatagacaagagaaactgagtttgaattttattttagctttttaaagatctgcccacctccccatcccagtaaaaatatttaattttttttgtgcaagttaacaacttctatgaattttacaatgcctaacactgtgcaaaatggccttccaaccactgccttttttttttttttttgccgtctttgtttttagccacatgtgcaataatctcaactgtttcctttttgttctgtcctatctttagttgacagagtcacatgtcacagagagagactcagcgcctggtccttccaactagtattgatacataaataagctgtttaatataaacaagtctttctatcttgctgtgcaatatgcacagagtgaggtagaggacccacagcaggaccaccgaggcgcgcagggcacaaggtttgccctctaggagaaagcaaggtgaaccgtgctccacacatagtttctcgaaaccagatttgtctgtttcgcatccttcttttccctttgctttaagaacaggagacaccagtactccggaattagtatgcaatttctttagaaagcaaagggaaacacttcctggctaattatcaccggccccgcccccacaccaaacctgagctgaatacttaggttcctaggtgtggaaccggaaagccaggtgatagactccatcctgccccctcccctccccgcctagtttccactcgggtccttgcagaaagtgtcaaaacccacctaggggcgggggggggggggaatgcctgaaggtgcattaaacacacgaaaggccgaacctcagagagaaaggaactcaagacaagccagtaagccatactaagccacactctcccaactcctcctaaactttcctttttgcgcaaacgctcggtccggggcttttctgtacgtctcggatgattcgatagatctgtgggctttgcattcacctgctttcggtcttgagtaaacagagatctcctctctcccctggggagcggctcaggggcgcccaggcgggctctcttcctctagggatgcagagcccgtgtccagcccgggactatggggagcggcgtccgtgcgcccagagagcctggctctctacaccttggactccgaggagaagccctggcgccccggctcgtccaggctcgaatcgctgtccacagtggttgtcccgccgttgcagccggtccagggctccagcaggcgcgccggtggggtggtcccggcgtcgtcgtcgtcgtcgtccgagggagctccgggggacggcggcggcccagctctcgccaggcagccggaggcgcgcggccggtccccgtgggctgcgcggcgtctgcaggcggcccggcgcgcgcagcagagcaggcgctggaaagccttgcggaagtcggggctgcggcagtagatgatggggttgaaggccgagttggcgtagcccagccagttgaagaagacgaagaggcgatccggcaccaggtcgcggtggaaagccttcaccacgttggccaggaagaagggcagccagcagagcgtgaacacacccatgatgatgcccagtgtcttgagcgccttctgctcgcgcagagccacgaggcgcgacggccgccgcttgctggagcgcccgttggccagcgagtctgcggggcgcggtggcccaggtgacggcgagggctcaggcgagggcggccgggctgggccgccgaggaagcggcgctcgcagctgtcgatcttctttacctgtttttgggcctcgcggaacacccgcaggtacacgaaggccatgatgcacaggggcacgtagaaggagacgacggacgaggcgatggcgtaggccctgttggtgacgaaatcgcagcacttggggtcgttgtagcagcggcgcgcttcgtcgctctcggcccgccaccagtgcatgaggatgggcaggaaggacaccaacgccgagatggcccacactgtgcacacgagggcccgcgctcgcgcgcgcgtcagcaaactctggtagcgaaagggcgacgtgatggcgaggtagcggtccagggcgatgacacacagggtctcaatgctggccgtcacacacagcacatctaccgaagtccagagctcgcagaagaaggagccgtactcccagcggccccacaccacgatggtggccccgaaaggcaccaccagcaatcccatgaccagatcagcgctggccagggacatgatgaagaggttggtgagcgtctgcagccgcggggtcttggcgatggccacgatcaccagcacgttacccaccacgatgagcagaacgatgagcgccagcagtaggcccatacccgcggtccactgctgcgacagcggcgctgagccctcgctggctggaggcagcagcgaggcgggaggcgacgcgagcaccagcagccgcgccgcggtggccgcaccgtcgggcagcggcgcggcggacgacaggttgcagggttcggaggcgcccagggcgagcgcccccgcgcccatgccgagctgcggaggccgggggcggggggtgtggcggggctgggccgcgcctggggagcaccccaggagccggggctgcggggcccgcgcggggaggtcgcggccaggtcagggcagccgcggctcggggccggaggcatggacgccgggcgccttctcctccgtagccgagcgctgtctccgccgccgccgccgccgctgctgctggagccgctgtcgctgctggaagagccgccgggacctcagcatgtttct

SEQ ID NO: 7 - RNA, 1401 nt, Rattus norvegicus
  source 1..1401: mol_type = mRNA
ctacaccttggactcggaggagaagccctggcgtcccggctcgtccaggctcgaatcgctgtccacagtggtcgtcccgccgttgcagccggcccagggctccaacaggcgcgcgggtggggtggccccggcgtcatcgtcgtcgtcgtccgaaggagccccgggggacggcggcggcccagctctcgccaggcagcccgaggcgcgcggccggtccccgtgggctgcgcggcgtctgcaggcggcccggcgcgcgcagcaaagcaggcgctggaaagccttgcggaagtcggggctgcggcagtagatgatggggttgaaggccgagttggcgtagcccagccagttgaagaagacgaagaggcgatccggcaccaggtcgcggtggaaagctttcaccacgttggccaggaagaagggcagccagcagagcgtgaacacacccatgatgatgcccagtgtcttgagcgccttctgctctcgcagagccacgaggcgcgacggccgccgcttgctggagcgcccgttggccagcgagtctgcggggcgcggtggccctggtgatggcgagggcgcgggcgagggcggccggggcgggcccgtgaggaagcggcgctcgcagctgtcgatcttcttcacctgtttctgggcctcgcggaacacccggaggtacacgaaggccatgatgcacaggggcacgtagaaggagacgacggacgaggcgatggcgtaggcccggttggtgacgaaatcgcagcacttggggtcgttgtagcagcggcgcgcttcgtcgctctcggcccgccaccagtgcatgaggatgggcaggaaggacaccagcgcggagatggcccacactgtgcacacgagggcccgcgctcgcgcgcgcgtcagcaggctctggtagcgaaagggcagcgtgatggcgaggtagcggtccagggcgatgacacacagggtctcgatgctggccgtcacacatagcacgtctaccgaagtccagagctcacagaagaaggagccgtactcccagcggccccacaccacaatggtggccccgaaaggcaccaccagcagtcccatgaccagatcggcgctggccagggacatgatgaagaggttggtgagcgtctgcagccgcggggtcttggcgatggccacgatcaccaacacgttgcccactacgatgagcagcacgatgagcgccaggagtaggcccatacccgcggtccactgctgcgacagcggcgctgagccctcgctggctggaggcagcagcgaggcgggaggcgacgcgagcaccagcagtcgtgccgcggtggccgcgccgtcgggcagcggcgcggccgacgacaggttgcagggttcggaggcgcccagggcgagcgcccccgcgcccat

SEQ ID NO: 8 - RNA, 2891 nt, Macaca mulatta
  source 1..2891: mol_type = mRNA
ttgattgtgcttcattggtatttattgcacatggaccaattcctcacacagtagttagttgcaccagagtataaatacttggtaaaacacacaagaggaagtagagttcacacacaagtgctaactttcaccagcaaattcacgtgggcacttggacataaaaaaaaaaaaataaaaaatccttaagataattatatttataatatggatacagttacagtaccatgataaaggagtataaaaaggtattttccccaataaatcattagctcaataacatactagacaacagaagtagagtttgaattttattttagtttttaagatctgcccagcccctccccctttaaaaaatatttaatttctttttgtgcaagtaacatctcctgtggactttgtaattcctaacactgtgcaaaaatggcattttgaaccactcctttttttgttgtttttgtttttatccacatgtgcagtaatctgaactgtttctctctctctaatgtcctgtcttcaattgacagagtcacatgtcacagagagaggctctgcgcctggtccttccaactaatattgatacataaataagctgtttaatataaacaagtcgttctatctgctgtgcaaacgcacagtgtgaggtagaaatccctcagcctgaccacccaggcgcgcgggggacggccggtttgccctacacaaggaaagcaaggtggggcttgttccaagaagagcttaacatttcttgaaacgtgaatttttttttttttgcctccatcctttctctttgctttcatgacagcagaactcattacttagaaattaaaatgaaatttatctggaaagcaaaagaaatacgtcttgacaaactgtcattctcctccctctggctggtagactgctcctgttcctgggaaagggataggagccacgctgatcgattttaatcccctcctaatgcttcttccttcccgtaacccacccaacttccactccggtcctcgcagagagtgtcaaaaaccaacgtgggggaaaaaaaatctaaagatgcatcacacgcacatacaaaagaaggccggaccacaaacagaaaaaaaaaaaaaaaaaggaagaaagaaagaaaaaaaaccaaggaacatcagcaagccactctcccatccctccccaaactttcctttttgtgcaatggtccgtggcttttctgtttgcctcggatgattcagacgaggattgtgggcttcgagttcacctgctttcggtcttgagtaaacacagatctcctcgttcccccgggaagtcgttccggggcgcccgggctctcctcctcccggggtgcccggcgtcctcgcccggcgccgggccctacaccttggactccgaggcgaatccggggcggcacggctcgtccaggctcgagtcgctgtccgccgccgccccgccgttgcagccggcccagggctccagcaggcgcgcgggctgcgtggccccgacgacatcgtcgtcgtcgtcgtccgaggcggccccgggcgacggcgggggtccgggccgggccagacagcccgaggcgcgcggccggtctccgtgggccgcgtggcgccggcgggcagccctgcgcgcgcagcagagcagtcgctggaaggcgttgcggaagtcggggctgcggcagtagatgatggggttgaaggccgagttggcgtagcccagccagttgaagaagacgaagaggcggtcgggcaccagctcgcggtggaaggccttcaccacgttggccaggaagaagggcagccaacagagcgtgaacacgcccatgatgatgcccagcgtcttgagcgccttctgctcgcgcagggccacgaggcgcgagggccgccgcttacccgcacgtccgttgaccagcggggcggtggtggcagcggcggcggcggggcgcggaggtccgggcggcggcgcggggaccggcgagggcgagggcgagggcgagggcgagggcggccgcgcggggccgccgaggaaacggcgctcgcagctgtcgatcttcttcacctgcttctgggcctcgcggaacacccgcaggtacacgaaggccatgatgcacaggggcacgtagaaggagaccacggacgaggcgatggcgtaggcccggttggtgacgaaatcgcagcacttggggtcgttgtagcagcggcgcgcctcgtcgctctccgcccgccaccaatgcatgaggatgggcaggaaggacaccagggctgagatggcccacacggtgcacacgaggccccgcgcccgcgcgcgcgtcagcaggctctggtagcggaagggcgaggtgatggcgaggtagcggtccagggcgatgacacacagggtctcgatgctggccgtcacgcacagcacgtccaccgaggtccacagctcgcagaagaaggagccgtactcccagcggccccacaccacgatggtggccccgaacggcaccaccagcagccccatgaccaggtcggcgctggccagggacatgatgaagaggttggtgagcgtctgcagccgcggcgtcttggcgatggccacgatcaccagcacgttgcccgccacgatgagcagcacgatgagcgccatcagcagacccatgcccgccgtccactgctgcgacagcggctcggggccttcgctggcgggaggcagcaacgaggcgggcggcgacgcgggcaccagcagccgcgccgcggtggccacgccgtcggggagcggtgcggccgacgacaggttaccgggctcggaggcgcccaggacgagcgcccccgcgcccatgccgagttgcggaggccggaggcggggggtgtggcagggctgggccttggttggggaacaccccagaagcctggacggcggggtgc

SEQ ID NO: 9 - RNA, 1443 nt, Macaca fascicularis
  source 1..1443: mol_type = mRNA
atgggcgcgggggcgctcgtcctgggcgcctccgagcccggtaacctgtcgtcggccgcaccgctccccgacggcgtggccaccgcggcgcggctgctggtgcccgcgtcgccgcccgcctcgttgctgcctcccgccagcgaaggccccgagccgctgtcgcagcagtggacggcgggcatgggtctgctgatggcgctcatcgtgctgctcatcgtggcgggcaacgtgctggtgatcgtggccatcgccaagacgccgcggctgcagacgctcaccaacctcttcatcatgtccctggccagcgccgacctggtcatggggctgctggtggtgccgttcggggccaccatcgtggtgtggggccgctgggagtacggctccttcttctgcgagctgtggacctcggtggacgtgctgtgcgtgacggccagcatcgagaccctgtgtgtcatcgccctggaccgctacctcgccatcacctcgcccttccgctaccagagcctgctgacgcgcgcgcgggcgcggggcctcgtgtgcaccgtgtgggccatctcagccctggtgtccttcctgcccatcctcatgcattggtggcgggcggagagcgacgaggcgcgccgctgctacaacgaccccaagtgctgcgatttcgtcaccaaccgggcctacgccatcgcctcgtccgtggtctccttctacgtgcccctgtgcatcatggccttcgtgtacctgcgggtgttccgcgaggcccagaagcaggtgaagaagatcgacagctgcgagcgccgtttcctcggcggccccgcgcggccgccctcgccctcgccctcgccctcgccctcgccggtccccgcgccgccgcccggacccccgcgccccgccgccgccgctgccaccaccgccccgctggtcaacggacgtgcgggtaagcggcggccctcgcgcctcgtggccctgcgcgagcagaaggcgctcaagacgctgggcatcatcatgggcgtgttcacgctctgttggctgcccttcttcctggccaacgtggtgaaggccttccaccgcgagctggtgcccgaccgcctcttcgtcttcttcaactggctgggctacgccaactcggccttcaaccccatcatctactgccgcagccccgacttccgcaacgccttccagcgactgctctgctgcgcgcgcagggctgcccgccggcgccacgcggcccacggagaccggccgcgcgcctcgggctgtctggcccggcccggacccccgccgtcgcccggggccgcctcggacgacgacgacgacgatgtcgtcggggccacgcagcccgcgcgcctgctggagccctgggccggctgcaacggcggggcggcggcggacagcgactcgagcctggacgagccgtgccgccccggattcgcctcggagtccaaggtgtag

SEQ ID NO: 10 - RNA, 1443 nt, Macaca fascicularis
  source 1..1443: mol_type = mRNA
ctacaccttggactccgaggcgaatccggggcggcacggctcgtccaggctcgagtcgctgtccgccgccgccccgccgttgcagccggcccagggctccagcaggcgcgcgggctgcgtggccccgacgacatcgtcgtcgtcgtcgtccgaggcggccccgggcgacggcgggggtccgggccgggccagacagcccgaggcgcgcggccggtctccgtgggccgcgtggcgccggcgggcagccctgcgcgcgcagcagagcagtcgctggaaggcgttgcggaagtcggggctgcggcagtagatgatggggttgaaggccgagttggcgtagcccagccagttgaagaagacgaagaggcggtcgggcaccagctcgcggtggaaggccttcaccacgttggccaggaagaagggcagccaacagagcgtgaacacgcccatgatgatgcccagcgtcttgagcgccttctgctcgcgcagggccacgaggcgcgagggccgccgcttacccgcacgtccgttgaccagcggggcggtggtggcagcggcggcggcggggcgcgggggtccgggcggcggcgcggggaccggcgagggcgagggcgagggcgagggcgagggcggccgcgcggggccgccgaggaaacggcgctcgcagctgtcgatcttcttcacctgcttctgggcctcgcggaacacccgcaggtacacgaaggccatgatgcacaggggcacgtagaaggagaccacggacgaggcgatggcgtaggcccggttggtgacgaaatcgcagcacttggggtcgttgtagcagcggcgcgcctcgtcgctctccgcccgccaccaatgcatgaggatgggcaggaaggacaccagggctgagatggcccacacggtgcacacgaggccccgcgcccgcgcgcgcgtcagcaggctctggtagcggaagggcgaggtgatggcgaggtagcggtccagggcgatgacacacagggtctcgatgctggccgtcacgcacagcacgtccaccgaggtccacagctcgcagaagaaggagccgtactcccagcggccccacaccacgatggtggccccgaacggcaccaccagcagccccatgaccaggtcggcgctggccagggacatgatgaagaggttggtgagcgtctgcagccgcggcgtcttggcgatggccacgatcaccagcacgttgcccgccacgatgagcagcacgatgagcgccatcagcagacccatgcccgccgtccactgctgcgacagcggctcggggccttcgctggcgggaggcagcaacgaggcgggcggcgacgcgggcaccagcagccgcgccgcggtggccacgccgtcggggagcggtgcggccgacgacaggttaccgggctcggaggcgcccaggacgagcgcccccgcgcccat

SEQ ID NO: 11 - RNA, 13993 nt, Homo sapiens
  source 1..13993: mol_type = mRNA
gtctccctctcgctgcctctgcagaaacagctcctgccagagcggcgctcggcgcggcgcggcgggcccggagcggcggcggcggctcttcctgcctccgcgcccaggagttgccggctccctttgacagcagagagccgggcaggggcctcaggaggactcgctgggagtgggcagaggcgcctcggcccctgccggcccaggcgggccccgcgcgccccccgcccctcctctccgcctcttctcgccctgcctctcccgatttattttttcaaatggtgtagccgccggaggtgcggtgctcagttcttggaaggggcccggatgtactgaggatgcgttacagtttcactcgaggaggcagtagtggaaaggagcagtttttggggtttgatgccataatgggaatcaggtaatcgtcggcggggaagaagaaacgctgcagaccacggcttcctcgaatcttgcgcgaaagccgccggcctcggaggagggattaatccagacccgccggggggtgttttcacatttcttcctcttcgtggctgctcctcctattaaaaccatttttggtccatggtcaatgagaatacgaggatgtacattccagaggaaaaccaccaaggttccaactatgggagcccacgccccgcccatgccaacatgaatgccaatgcggcagcggggctggcccctgagcacatccccaccccgggggctgccctgtcgtggcaggcggccatcgacgcagcccggcaggctaagctgatgggcagcgctggcaatgcgaccatctccacagtcagctccacgcagcggaagcggcagcaatatgggaaacccaagaagcagggcagcaccacggccacacgcccgccccgagccctgctctgcctgaccctgaagaaccccatccggagggcctgcatcagcattgtcgaatggaaaccatttgaaataattattttactgactatttttgccaattgtgtggccttagcgatctatattccctttccagaagatgattccaacgccaccaattccaacctggaacgagtggaatatctctttctcataatttttacggtggaagcgtttttaaaagtaatcgcctatggactcctctttcaccccaatgcctacctccgcaacggctggaacctactagattttataattgtggttgtggggctttttagtgcaattttagaacaagcaaccaaagcagatggggcaaacgctctcggagggaaaggggccggatttgatgtgaaggcgctgagggccttccgcgtgctgcgccccctgcggctggtgtccggagtcccaagtctccaggtggtcctgaattccatcatcaaggccatggtccccctgctgcacatcgccctgcttgtgctgtttgtcatcatcatctacgccatcatcggcttggagctcttcatggggaagatgcacaagacctgctacaaccaggagggcatagcagatgttccagcagaagatgacccttccccttgtgcgctggaaacgggccacgggcggcagtgccagaacggcacggtgtgcaagcccggctgggatggtcccaagcacggcatcaccaactttgacaactttgccttcgccatgctcacggtgttccagtgcatcaccatggagggctggacggacgtgctgtactgggtcaatgatgccgtaggaagggactggccctggatctattttgttacactaatcatcatagggtcattttttgtacttaacttggttctcggtgtgcttagcggagagttttccaaagagagggagaaggccaaggcccggggagatttccagaagctgcgggagaagcagcagctagaagaggatctcaaaggctacctggattggatcactcaggccgaagacatcgatcctgagaatgaggacgaaggcatggatgaggagaagccccgaaacatgagcatgcccaccagtgagaccgagtccgtcaacaccgaaaacgtggctggaggtgacatcgagggagaaaactgcggggccaggctggcccaccggatctccaagtcaaagttcagccgctactggcgccggtggaatcggttctgcagaaggaagtgccgcgccgcagtcaagtctaatgtcttctactggctggtgattttcctggtgttcctcaacacgctcaccattgcctctgagcactacaaccagcccaactggctcacagaagtccaagacacggcaaacaaggccctgctggccctgttcacggcagagatgctcctgaagatgtacagcctgggcctgcaggcctacttcgtgtccctcttcaaccgctttgactgcttcgtcgtgtgtggcggcatcctggagaccatcctggtggagaccaagatcatgtccccactgggcatctccgtgctcagatgcgtccggctgctgaggattttcaagatcacgaggtactggaactccttgagcaacctggtggcatccttgctgaactctgtgcgctccatcgcctccctgctccttctcctcttcctcttcatcatcatcttctccctcctggggatgcagctctttggaggaaagttcaactttgatgagatgcagacccggaggagcacattcgataacttcccccagtccctcctcactgtgtttcagatcctgaccggggaggactggaattcggtgatgtatgatgggatcatggcttatggcggcccctcttttccagggatgttagtctgtatttacttcatcatcctcttcatctgtggaaactatatcctactgaatgtgttcttggccattgctgtggacaacctggctgatgctgagagcctcacatctgcccaaaaggaggaggaagaggagaaggagagaaagaagctggccaggactgccagcccagagaagaaacaagagttggtggagaagccggcagtgggggaatccaaggaggagaagattgagctgaaatccatcacggctgacggagagtctccacccgccaccaagatcaacatggatgacctccagcccaatgaaaatgaggataagagcccctaccccaacccagaaactacaggagaagaggatgaggaggagccagagatgcctgtcggccctcgcccacgaccactctctgagcttcaccttaaggaaaaggcagtgcccatgccagaagccagcgcgtttttcatcttcagctctaacaacaggtttcgcctccagtgccaccgcattgtcaatgacacgatcttcaccaacctgatcctcttcttcattctgctcagcagcatttccctggctgctgaggacccggtccagcacacctccttcaggaaccatattctgttttattttgatattgtttttaccaccattttcaccattgaaattgctctgaagatcctaggcaatgcagactatgtcttcactagtatctttacattagaaattatccttaagatgactgcttatggggctttcttgcacaagggttctttctgccggaactacttcaacatcctggacctgctggtggtcagcgtgtccctcatctcctttggcatccagtccagtgcaatcaatgtcgtgaagatcttgcgagtcctgcgagtactcaggcccctgagggccatcaacagggccaaggggctaaagcatgtggttcagtgtgtgtttgtcgccatccggaccatcgggaacatcgtgattgtcaccaccctgctgcagttcatgtttgcctgcatcggggtccagctcttcaagggaaagctgtacacctgttcagacagttccaagcagacagaggcggaatgcaagggcaactacatcacgtacaaagacggggaggttgaccaccccatcatccaaccccgcagctgggagaacagcaagtttgactttgacaatgttctggcagccatgatggccctcttcaccgtctccaccttcgaagggtggccagagctgctgtaccgctccatcgactcccacacggaagacaagggccccatctacaactaccgtgtggagatctccatcttcttcatcatctacatcatcatcatcgccttcttcatgatgaacatcttcgtgggcttcgtcatcgtcacctttcaggagcagggggagcaggagtacaagaactgtgagctggacaagaaccagcgacagtgcgtggaatacgccctcaaggcccggcccctgcggaggtacatccccaagaaccagcaccagtacaaagtgtggtacgtggtcaactccacctacttcgagtacctgatgttcgtcctcatcctgctcaacaccatctgcctggccatgcagcactacggccagagctgcctgttcaaaatcgccatgaacatcctcaacatgctcttcactggcctcttcaccgtggagatgatcctgaagctcattgccttcaaacccaagggttactttagtgatccctggaatgtttttgacttcctcatcgtaattggcagcataattgacgtcattctcagtgagactaatcactatttctgtgatgcatggaatacatttgacgccttgattgttgtgggtagcattgttgatatagcaatcaccgaggtaaacccagctgaacatacccaatgctctccctctatgaacgcagaggaaaactcccgcatctccatcaccttcttccgcctgttccgggtcatgcgtctggtgaagctgctgagccgtggggagggcatccggacgctgctgtggaccttcatcaagtccttccaggccctgccctatgtggccctcctgatcgtgatgctgttcttcatctacgcggtgatcgggatgcaggtgtttgggaaaattgccctgaatgataccacagagatcaaccggaacaacaactttcagaccttcccccaggccgtgctgctcctcttcaggtgtgccaccggggaggcctggcaggacatcatgctggcctgcatgccaggcaagaagtgtgccccagagtccgagcccagcaacagcacggagggtgaaacaccctgtggtagcagctttgctgtcttctacttcatcagcttctacatgctctgtgccttcctgatcatcaacctctttgtagctgtcatcatggacaactttgactacctgacaagggactggtccatccttggtccccaccacctggatgagtttaaaagaatctgggcagagtatgaccctgaagccaagggtcgtatcaaacacctggatgtggtgaccctcctccggcggattcagccgccactaggttttgggaagctgtgccctcaccgcgtggcttgcaaacgcctggtctccatgaacatgcctctgaacagcgacgggacagtcatgttcaatgccaccctgtttgccctggtcaggacggccctgaggatcaaaacagaagggaacctagaacaagccaatgaggagctgcgggcgatcatcaagaagatctggaagcggaccagcatgaagctgctggaccaggtggtgccccctgcaggtgatgatgaggtcaccgttggcaagttctacgccacgttcctgatccaggagtacttccggaagttcaagaagcgcaaagagcagggccttgtgggcaagccctcccagaggaacgcgctgtctctgcaggctggcttgcgcacactgcatgacatcgggcctgagatccgacgggccatctctggagatctcaccgctgaggaggagctggacaaggccatgaaggaggctgtgtccgctgcttctgaagatgacatcttcaggagggccggtggcctgttcggcaaccacgtcagctactaccaaagcgacggccggagcgccttcccccagaccttcaccactcagcgcccgctgcacatcaacaaggcgggcagcagccagggcgacactgagtcgccatcccacgagaagctggtggactccaccttcaccccgagcagctactcgtccaccggctccaacgccaacatcaacaacgccaacaacaccgccctgggtcgcctccctcgccccgccggctaccccagcacggtcagcactgtggagggccacgggccccccttgtcccctgccatccgggtgcaggaggtggcgtggaagctcagctccaacagggaaaggcacgttccgatgtgtgaggatctggagctcaggagggattcaggctcagcagggactcaggctcactgccttctgctcaggagagcaaacccctctaggtgccactcccgggagagccaggcagccatggcgggtcaggaggagacgtctcaggatgagacctatgaagtgaagatgaaccatgacacggaggcctgcagtgagcccagcctgctctccacagagatgctctcctaccaggatgacgaaaatcggcaactgacgctcccagaggaggacaagagggacatccggcaatctccgaagaggggtttcctccgctctgcctcactaggtcgaagggcctccttccacctggaatgtctgaagcgacagaaggaccgagggggagacatctctcagaagacagtcctgcccttgcatctggttcatcatcaggcattggcagtggcaggcctgagccccctcctccagagaagccattcccctgcctcattccctaggccttttgccaccccaccagccacacctggcagccgaggctggcccccacagcccgtccccaccctgcggcttgagggggtcgagtccagtgagaaactcaacagcagcttcccatccatccactgcggctcctgggctgagaccacccccggtggcgggggcagcagcgccgcccggagagtccggcccgtctccctcatggtgcccagccaggctggggccccagggaggcagttccacggcagtgccagcagcctggtggaagcggtcttgatttcagaaggactggggcagtttgctcaagatcccaagttcatcgaggtcaccacccaggagctggccgacgcctgcgacatgaccatagaggagatggagagcgcggccgacaacatcctcagcgggggcgccccacagagccccaatggcgccctcttaccctttgtgaactgcagggacgcggggcaggaccgagccgggggcgaagaggacgcgggctgtgtgcgcgcgcggggtcgaccgagtgaggaggagctccaggacagcagggtctacgtcagcagcctgtagtgggcgctgccagatgcgggcttttttttatttgtttcaatgttcctaatgggttcgtttcagaagtgcctcactgttctcgtgacctggagttaaccggaacagcgtcttcattcatttctgttgggaccagacgcggagcctgggtgcgcgagccgccctccgggaggaaggcgcccggctgcgtctgcagaggcggggagaggaggcggcgagggtcccggggcgcgaggaaggcgcctgccctctcccagctcgcaggccccgggcccggccgcgcctccgcggggagagcaccccggcttcccgcgcgccctcaccaaaaggaccctacagcaaacgggtgtctttcgactctgcttgtagaaaccatttgcacatattctgtacgagcctcgctgtctccctagagccagggccctgcggatttggagaagggagcggggcaggacttccaggaggaccccaacccggcccggagagggaggaggaggcctccaggggcgcggagctctggggatgggcgtcgggccggcagtggtgcggctcactccgtccctgcccacctgcgacgggatcccccgaccggcacgggccacgccgagctcccggccagccgccggcccgcaggcagcgcgagggaggagctgcgccgccggctccgcccaaccaggtggtgctgagcttccgctgagcgctcttttgttttgtggtttgacacttttcttgacagcatgttgcagtttcttttcggttttggttttttttaaatgttttattttgctttcccagcgggaggggaggaagaagagtgtttacaaagtcctgtagccccctcacctttctgttttcacttttgccaatgtacatcgggtttggttttcttgtattatttaaacggttgtggtttcctttttccacggaggttcaatagaagccgctgcaggagagttttaccaaccattgtgtatgcccaataatttgttatcatttccttaggtagtaacctatttttgttctggtttggttcggttatctaatggaaaggtaactggcaatgcacttgatgtggtcttgcacatgtgggtgatagagttgggttcctttttatgctgggtgtacaggtgggtttgggagagaggagcatgcgcgagagagtctccgagtgtgtgcgacgcgtgtgtgtgtggtgggttgtctgtgtgcatatgtcctgcccgtgtatatgcacccacaccatgtgcccgtgcacaccagtgactacgcagtcccccctttctggtttagctgtgggaagatctgaatctggggccgtttgaaagcaaaaacaaaccactgtctctgcttctgaaacgggaatcagtaactctttgcattttctgtcccacaagatatgcaaaaacaatgcaataatattcatttaaaaatacaattgtgagttgtgttggcattaaaactgtattttaaaaaaagacagaaatttaagggaaaaacacaagaaggcattttgcttcaatatattccgtgtaatgttttattgcattgataatgtttctgttgaagaaaccgttatacttgaattcaggtcagtttcagtatttttcaaatatttttttaaaactgaattgcaattgtgccaagcgaatataatgaattgaattaagttggttttcggattcacttcttgtatattttgctgcatgtaaagtaaatcattttgtatttggagtgtgacaagctttacctttgaactcaagtgcttttctatatgtggttgggggaaagggaacaagttttctttagtttgcacaatgagcaaaggtatcaccagtgtagtcattattctgctctccacaaacaggtttggacattactgttttgcatatcttgtgtttgcttacatttccctcaatttttccaaaatcgtttgctgggtatgtttgtaccgcctcttgctgtgagagaccaggacctattttattccagtcttcactctgtccactctgctctggtcatctgatttggtacttctccaagaacagcccttcactgtgaggtgcagggaggcgttctgatgagccctcagtcactgggccgtcatccgcatcccccatggaagaggtagctggctttcccttcccttccaccacacggaattttctctttggcttccttaggaaagtgtacactaaccgggaggataaaattaaagtcaggctgcttggagggaggggcatcctcacttccggattcttgttgctctacccaacaaggacagcaggggctcgagaaaggaactggtgaaaccctgatccatctgaaagtcaactctgcgtgctcctttctccatcccttcctcactctggagcagcctttccttcaggcttgccctaatgtttgggctgccggggagggggccaggacaagggaagaggcatccggagctcacagtgggggtgggaacagatttttgtgggggcatctctaatgctcacttatatctccctagaacatcactcttttggtgctgtgtccttcaaatgtatgtcaacagtggtggctgaaaagggactgctttggggaaaacaggacccaaccattcacccagaattgacccattaaatctcttccagtcctagtgttccctgagcccctcttggcacatatataagtaagctagaaattacaataagggacagtccattcctctatgacagcttgctggactgattcatgacaaagtggagaaatgtactcaatactccccggttaacacagtctagaaacagagtttctttatggatatccacacccaagtcatccaaactttcttgattccttttcactgccatcaaggtcctctagaaattgagtttaggtatcatcctttgaaaagttcccaagatttctaccaggaggtacacacaggcgttccctgtctagggcaggaggactatcctagcttgaccttctgatccactagaataagactggcgtatgatgcctgtcatcagaacagactggcacaagtagtgacatcaatgaaccacagcacaatcttccaagtgatgtctactctccacctaaaatggaattttccccatgaccttgtaaaacataattgtcacatcttccatacccctcctgacagcccccaagtgtcaggagaaaacagtcaggggctaagggcccaagggacttgaagaaacaacagtttaaggtctgcagtttggtcaacttaattcttgtcctccgaccagccctgcctctttcatttccagaccttggagaatttttcccagctttgattcagaaggtactagttataacccctttccttcttcttaatccaataggcctcactctcactgggaaatccactcaaaggaacaaggcaatgtctctcattctatttcccagttccaaattccaggtgcttgtctggagtgaagctacccgttactttctcccagcttttctccacccagcatgtctcctgcccatgcagctgaagacagtggggcaacctcaggagaagcagacctttccatgcccaagttcatctcctgagcaacagtgacacctagaaaatgaggactttggaagtcacccaaaagatggtggctactttatggagtcctgaagatacacagccaccactcctaaaggcaaagaaagaaaacacgaatgtaggtcagggatagagtggaaccctggtcatcggggtttttagcctcatcgtgggaaaggtggtaaaggaggatgatggcatctccatccctagaggccaagaattgaaatatcattgtcaaggattagaaacaattcagcaaagaggccacaaaaagggcctgctgactcccagaagacctctttaaaccccaggggaggcaaatacttgctgatggagtctgggccgtttccatattttaaagaagacctgcctctggggcaaatgtcagcacagagaggactgggaggagaatggaggcaagaaaagggcatattttgactccctctgtgcctcttcccagttcatggaaggatgtgttcagcttacccacccacagtgaccagtgtggtggagccgctgacatctcaaggatctatttgggaaggtgagaagagtactcattccatctgggggtgttgttccagccacatcagcctacctggtgggatgtgggggtgtctgccaccctgtcccccctctgctgatgtccctcccctcaggctgtccaggtgccacctgacacaggctgctgtgcaaagacaggcggggaagcccaaacctcactcccagggaggccctcagccgccagagtccaggttctccagaggctacgatttgaggaggttgagggggaagacaggagggaaagaaaagtcctacaactgtcaggaatggggcacctttccctgtccctaagcaaagctccctcttcccactgccctccccagccccagctccctgtcctccccaacacctagtgagaaagacggtgcgtggaagggagtcccatgggcagatgcttacacgacctctttgtgaagcctcttctgggtttaacttcattcatcaatttattcttatgtcaaagcaatgaaacttttctttctggagccagataccaatacaacaggtgaacgggtttctgccacatctctacattgacgggggatgcttgaacaacccccctcactacacagacacacaccgttaaggcacaagggctggggttgagctctagatgagggactttcctgctcctgcaagggtgagcactgtatacacagacaaggagggtgcagtagagtgactcccttggatggaagtagtaccatcagaacctactattattatgacataaattctatttacatacattgagagaatactacaatcaacactttttcctgggatgactttaagaggtttgagccacagcacctgaagtggcaaagatccatggtctttgtagggtattagagaactcttccagtcacctctgaaagcactctagatcttgcagctgagtggatgaagtgtaacaaatctgttgcacgctgagaggagtcagaattagcatttttcatgaaagttccccacgtctctactaagaatgaggaagaaaagactaagactaggtaattacacagaggcttgaaatgttacatcaccagagccaagtcctctcccttcagatcagttactggctgctacacagggacacccccaccttttcagggcatcccatgcactccacttctcaggatctaaggaatttgactttgtagggatcccagaaagggcactgtgccacttcccctggtgtgaatcagacatacattgtacattcatttctaaaattcactcatgcacctcaaaccaaggtcattatccaaaaaaaaaaaaaaaaagctctgggtggaagagtttgtaagttttaagagagggtcatttctatgtgaggaaatgcagaaatggacagaatgattcttattcactgtttgggtctggagaattcccattgtggaaatcttagagatctcaagtttattaccaagggaataaggaaaaaaaggtgagcaggcaccaggccaagcagtggctcccttgccaaggaacctgaggctgcaggtttcagggacccccttgaagaaacctctcctggccattggccaggagaaaagagaagtctctcctgtagagtcacaagagaagcaaaagagggtgggtcactgggtcctggacatagcccccaaccccaagacttcccaatatggagaaactacaccaatgtttaaaaggggaaaaggaaagaacttgtacatcaagggaagatgatttgtaaacacacagtcctgtgcagaaagatccccttcaggaggtgtctccagcatcccaaagctgtgcgcaccttctcttttcctgcctcaggccacctatgcatccagctgcagcccatacccacacctgaaatccatctcttgaatcccagccaggttatataccaccccattgccatgtcctgtcctggccagaatgcatgctgttcccccaagcctcgtgggagtgaggccatgggaaacagagatgagcatgtctggacaagtctgtgatggtagtggatgagaataacccatggcaaaacacgcacattcattaagaaatagggcgacagattccccgttggtgaagcactgaaaggtctattactctcataatattgctgttttattttaatccaccagagctaccatgcaaaactttcctcctgtgaaacgctccagataaagctcctctaatctccccttccctcatgtcctccagctcaaacccaccttcatcccccaaaccaatctgtatcatgcctgttatcagagaggcacagaaagatgggcagtgcctccgttgtcaccattccccacacccctacacacccccacaccctcccctccaggctccacgacttcacagtcttactgttgtaaatatcattgtacagtttgtaatcctcaaataatcccattgtcagaggcctcgcctgatgggccttctcaccctcgagaaaggccagggaatctagaaggggcaacccttcaaggagagcttcagggtcatctctgtgtgagacactattgtatattcctgtaagattgcatttttatctaaggaatgatgttatttaaaaaacaaacaaaaaacacaaaaaataagaattgcaaataaatttcttaacaatgtcta

SEQ ID NO: 12 - RNA, 13993 nt, Homo sapiens
  source 1..13993: mol_type = mRNA
tagacattgttaagaaatttatttgcaattcttattttttgtgttttttgtttgttttttaaataacatcattccttagataaaaatgcaatcttacaggaatatacaatagtgtctcacacagagatgaccctgaagctctccttgaagggttgccccttctagattccctggcctttctcgagggtgagaaggcccatcaggcgaggcctctgacaatgggattatttgaggattacaaactgtacaatgatatttacaacagtaagactgtgaagtcgtggagcctggaggggagggtgtgggggtgtgtaggggtgtggggaatggtgacaacggaggcactgcccatctttctgtgcctctctgataacaggcatgatacagattggtttgggggatgaaggtgggtttgagctggaggacatgagggaaggggagattagaggagctttatctggagcgtttcacaggaggaaagttttgcatggtagctctggtggattaaaataaaacagcaatattatgagagtaatagacctttcagtgcttcaccaacggggaatctgtcgccctatttcttaatgaatgtgcgtgttttgccatgggttattctcatccactaccatcacagacttgtccagacatgctcatctctgtttcccatggcctcactcccacgaggcttgggggaacagcatgcattctggccaggacaggacatggcaatggggtggtatataacctggctgggattcaagagatggatttcaggtgtgggtatgggctgcagctggatgcataggtggcctgaggcaggaaaagagaaggtgcgcacagctttgggatgctggagacacctcctgaaggggatctttctgcacaggactgtgtgtttacaaatcatcttcccttgatgtacaagttctttccttttccccttttaaacattggtgtagtttctccatattgggaagtcttggggttgggggctatgtccaggacccagtgacccaccctcttttgcttctcttgtgactctacaggagagacttctcttttctcctggccaatggccaggagaggtttcttcaagggggtccctgaaacctgcagcctcaggttccttggcaagggagccactgcttggcctggtgcctgctcacctttttttccttattcccttggtaataaacttgagatctctaagatttccacaatgggaattctccagacccaaacagtgaataagaatcattctgtccatttctgcatttcctcacatagaaatgaccctctcttaaaacttacaaactcttccacccagagctttttttttttttttttggataatgaccttggtttgaggtgcatgagtgaattttagaaatgaatgtacaatgtatgtctgattcacaccaggggaagtggcacagtgccctttctgggatccctacaaagtcaaattccttagatcctgagaagtggagtgcatgggatgccctgaaaaggtgggggtgtccctgtgtagcagccagtaactgatctgaagggagaggacttggctctggtgatgtaacatttcaagcctctgtgtaattacctagtcttagtcttttcttcctcattcttagtagagacgtggggaactttcatgaaaaatgctaattctgactcctctcagcgtgcaacagatttgttacacttcatccactcagctgcaagatctagagtgctttcagaggtgactggaagagttctctaataccctacaaagaccatggatctttgccacttcaggtgctgtggctcaaacctcttaaagtcatcccaggaaaaagtgttgattgtagtattctctcaatgtatgtaaatagaatttatgtcataataatagtaggttctgatggtactacttccatccaagggagtcactctactgcaccctccttgtctgtgtatacagtgctcacccttgcaggagcaggaaagtccctcatctagagctcaaccccagcccttgtgccttaacggtgtgtgtctgtgtagtgaggggggttgttcaagcatcccccgtcaatgtagagatgtggcagaaacccgttcacctgttgtattggtatctggctccagaaagaaaagtttcattgctttgacataagaataaattgatgaatgaagttaaacccagaagaggcttcacaaagaggtcgtgtaagcatctgcccatgggactcccttccacgcaccgtctttctcactaggtgttggggaggacagggagctggggctggggagggcagtgggaagagggagctttgcttagggacagggaaaggtgccccattcctgacagttgtaggacttttctttccctcctgtcttccccctcaacctcctcaaatcgtagcctctggagaacctggactctggcggctgagggcctccctgggagtgaggtttgggcttccccgcctgtctttgcacagcagcctgtgtcaggtggcacctggacagcctgaggggagggacatcagcagaggggggacagggtggcagacacccccacatcccaccaggtaggctgatgtggctggaacaacacccccagatggaatgagtactcttctcaccttcccaaatagatccttgagatgtcagcggctccaccacactggtcactgtgggtgggtaagctgaacacatccttccatgaactgggaagaggcacagagggagtcaaaatatgcccttttcttgcctccattctcctcccagtcctctctgtgctgacatttgccccagaggcaggtcttctttaaaatatggaaacggcccagactccatcagcaagtatttgcctcccctggggtttaaagaggtcttctgggagtcagcaggccctttttgtggcctctttgctgaattgtttctaatccttgacaatgatatttcaattcttggcctctagggatggagatgccatcatcctcctttaccacctttcccacgatgaggctaaaaaccccgatgaccagggttccactctatccctgacctacattcgtgttttctttctttgcctttaggagtggtggctgtgtatcttcaggactccataaagtagccaccatcttttgggtgacttccaaagtcctcattttctaggtgtcactgttgctcaggagatgaacttgggcatggaaaggtctgcttctcctgaggttgccccactgtcttcagctgcatgggcaggagacatgctgggtggagaaaagctgggagaaagtaacgggtagcttcactccagacaagcacctggaatttggaactgggaaatagaatgagagacattgccttgttcctttgagtggatttcccagtgagagtgaggcctattggattaagaagaaggaaaggggttataactagtaccttctgaatcaaagctgggaaaaattctccaaggtctggaaatgaaagaggcagggctggtcggaggacaagaattaagttgaccaaactgcagaccttaaactgttgtttcttcaagtcccttgggcccttagcccctgactgttttctcctgacacttgggggctgtcaggaggggtatggaagatgtgacaattatgttttacaaggtcatggggaaaattccattttaggtggagagtagacatcacttggaagattgtgctgtggttcattgatgtcactacttgtgccagtctgttctgatgacaggcatcatacgccagtcttattctagtggatcagaaggtcaagctaggatagtcctcctgccctagacagggaacgcctgtgtgtacctcctggtagaaatcttgggaacttttcaaaggatgatacctaaactcaatttctagaggaccttgatggcagtgaaaaggaatcaagaaagtttggatgacttgggtgtggatatccataaagaaactctgtttctagactgtgttaaccggggagtattgagtacatttctccactttgtcatgaatcagtccagcaagctgtcatagaggaatggactgtcccttattgtaatttctagcttacttatatatgtgccaagaggggctcagggaacactaggactggaagagatttaatgggtcaattctgggtgaatggttgggtcctgttttccccaaagcagtcccttttcagccaccactgttgacatacatttgaaggacacagcaccaaaagagtgatgttctagggagatataagtgagcattagagatgcccccacaaaaatctgttcccacccccactgtgagctccggatgcctcttcccttgtcctggccccctccccggcagcccaaacattagggcaagcctgaaggaaaggctgctccagagtgaggaagggatggagaaaggagcacgcagagttgactttcagatggatcagggtttcaccagttcctttctcgagcccctgctgtccttgttgggtagagcaacaagaatccggaagtgaggatgcccctccctccaagcagcctgactttaattttatcctcccggttagtgtacactttcctaaggaagccaaagagaaaattccgtgtggtggaagggaagggaaagccagctacctcttccatgggggatgcggatgacggcccagtgactgagggctcatcagaacgcctccctgcacctcacagtgaagggctgttcttggagaagtaccaaatcagatgaccagagcagagtggacagagtgaagactggaataaaataggtcctggtctctcacagcaagaggcggtacaaacatacccagcaaacgattttggaaaaattgagggaaatgtaagcaaacacaagatatgcaaaacagtaatgtccaaacctgtttgtggagagcagaataatgactacactggtgatacctttgctcattgtgcaaactaaagaaaacttgttccctttcccccaaccacatatagaaaagcacttgagttcaaaggtaaagcttgtcacactccaaatacaaaatgatttactttacatgcagcaaaatatacaagaagtgaatccgaaaaccaacttaattcaattcattatattcgcttggcacaattgcaattcagttttaaaaaaatatttgaaaaatactgaaactgacctgaattcaagtataacggtttcttcaacagaaacattatcaatgcaataaaacattacacggaatatattgaagcaaaatgccttcttgtgtttttcccttaaatttctgtctttttttaaaatacagttttaatgccaacacaactcacaattgtatttttaaatgaatattattgcattgtttttgcatatcttgtgggacagaaaatgcaaagagttactgattcccgtttcagaagcagagacagtggtttgtttttgctttcaaacggccccagattcagatcttcccacagctaaaccagaaaggggggactgcgtagtcactggtgtgcacgggcacatggtgtgggtgcatatacacgggcaggacatatgcacacagacaacccaccacacacacacgcgtcgcacacactcggagactctctcgcgcatgctcctctctcccaaacccacctgtacacccagcataaaaaggaacccaactctatcacccacatgtgcaagaccacatcaagtgcattgccagttacctttccattagataaccgaaccaaaccagaacaaaaataggttactacctaaggaaatgataacaaattattgggcatacacaatggttggtaaaactctcctgcagcggcttctattgaacctccgtggaaaaaggaaaccacaaccgtttaaataatacaagaaaaccaaacccgatgtacattggcaaaagtgaaaacagaaaggtgagggggctacaggactttgtaaacactcttcttcctcccctcccgctgggaaagcaaaataaaacatttaaaaaaaaccaaaaccgaaaagaaactgcaacatgctgtcaagaaaagtgtcaaaccacaaaacaaaagagcgctcagcggaagctcagcaccacctggttgggcggagccggcggcgcagctcctccctcgcgctgcctgcgggccggcggctggccgggagctcggcgtggcccgtgccggtcgggggatcccgtcgcaggtgggcagggacggagtgagccgcaccactgccggcccgacgcccatccccagagctccgcgcccctggaggcctcctcctccctctccgggccgggttggggtcctcctggaagtcctgccccgctcccttctccaaatccgcagggccctggctctagggagacagcgaggctcgtacagaatatgtgcaaatggtttctacaagcagagtcgaaagacacccgtttgctgtagggtccttttggtgagggcgcgcgggaagccggggtgctctccccgcggaggcgcggccgggcccggggcctgcgagctgggagagggcaggcgccttcctcgcgccccgggaccctcgccgcctcctctccccgcctctgcagacgcagccgggcgccttcctcccggagggcggctcgcgcacccaggctccgcgtctggtcccaacagaaatgaatgaagacgctgttccggttaactccaggtcacgagaacagtgaggcacttctgaaacgaacccattaggaacattgaaacaaataaaaaaaagcccgcatctggcagcgcccactacaggctgctgacgtagaccctgctgtcctggagctcctcctcactcggtcgaccccgcgcgcgcacacagcccgcgtcctcttcgcccccggctcggtcctgccccgcgtccctgcagttcacaaagggtaagagggcgccattggggctctgtggggcgcccccgctgaggatgttgtcggccgcgctctccatctcctctatggtcatgtcgcaggcgtcggccagctcctgggtggtgacctcgatgaacttgggatcttgagcaaactgccccagtccttctgaaatcaagaccgcttccaccaggctgctggcactgccgtggaactgcctccctggggccccagcctggctgggcaccatgagggagacgggccggactctccgggcggcgctgctgcccccgccaccgggggtggtctcagcccaggagccgcagtggatggatgggaagctgctgttgagtttctcactggactcgaccccctcaagccgcagggtggggacgggctgtgggggccagcctcggctgccaggtgtggctggtggggtggcaaaaggcctagggaatgaggcaggggaatggcttctctggaggagggggctcaggcctgccactgccaatgcctgatgatgaaccagatgcaagggcaggactgtcttctgagagatgtctccccctcggtccttctgtcgcttcagacattccaggtggaaggaggcccttcgacctagtgaggcagagcggaggaaacccctcttcggagattgccggatgtccctcttgtcctcctctgggagcgtcagttgccgattttcgtcatcctggtaggagagcatctctgtggagagcaggctgggctcactgcaggcctccgtgtcatggttcatcttcacttcataggtctcatcctgagacgtctcctcctgacccgccatggctgcctggctctcccgggagtggcacctagaggggtttgctctcctgagcagaaggcagtgagcctgagtccctgctgagcctgaatccctcctgagctccagatcctcacacatcggaacgtgcctttccctgttggagctgagcttccacgccacctcctgcacccggatggcaggggacaaggggggcccgtggccctccacagtgctgaccgtgctggggtagccggcggggcgagggaggcgacccagggcggtgttgttggcgttgttgatgttggcgttggagccggtggacgagtagctgctcggggtgaaggtggagtccaccagcttctcgtgggatggcgactcagtgtcgccctggctgctgcccgccttgttgatgtgcagcgggcgctgagtggtgaaggtctgggggaaggcgctccggccgtcgctttggtagtagctgacgtggttgccgaacaggccaccggccctcctgaagatgtcatcttcagaagcagcggacacagcctccttcatggccttgtccagctcctcctcagcggtgagatctccagagatggcccgtcggatctcaggcccgatgtcatgcagtgtgcgcaagccagcctgcagagacagcgcgttcctctgggagggcttgcccacaaggccctgctctttgcgcttcttgaacttccggaagtactcctggatcaggaacgtggcgtagaacttgccaacggtgacctcatcatcacctgcagggggcaccacctggtccagcagcttcatgctggtccgcttccagatcttcttgatgatcgcccgcagctcctcattggcttgttctaggttcccttctgttttgatcctcagggccgtcctgaccagggcaaacagggtggcattgaacatgactgtcccgtcgctgttcagaggcatgttcatggagaccaggcgtttgcaagccacgcggtgagggcacagcttcccaaaacctagtggcggctgaatccgccggaggagggtcaccacatccaggtgtttgatacgacccttggcttcagggtcatactctgcccagattcttttaaactcatccaggtggtggggaccaaggatggaccagtcccttgtcaggtagtcaaagttgtccatgatgacagctacaaagaggttgatgatcaggaaggcacagagcatgtagaagctgatgaagtagaagacagcaaagctgctaccacagggtgtttcaccctccgtgctgttgctgggctcggactctggggcacacttcttgcctggcatgcaggccagcatgatgtcctgccaggcctccccggtggcacacctgaagaggagcagcacggcctgggggaaggtctgaaagttgttgttccggttgatctctgtggtatcattcagggcaattttcccaaacacctgcatcccgatcaccgcgtagatgaagaacagcatcacgatcaggagggccacatagggcagggcctggaaggacttgatgaaggtccacagcagcgtccggatgccctccccacggctcagcagcttcaccagacgcatgacccggaacaggcggaagaaggtgatggagatgcgggagttttcctctgcgttcatagagggagagcattgggtatgttcagctgggtttacctcggtgattgctatatcaacaatgctacccacaacaatcaaggcgtcaaatgtattccatgcatcacagaaatagtgattagtctcactgagaatgacgtcaattatgctgccaattacgatgaggaagtcaaaaacattccagggatcactaaagtaacccttgggtttgaaggcaatgagcttcaggatcatctccacggtgaagaggccagtgaagagcatgttgaggatgttcatggcgattttgaacaggcagctctggccgtagtgctgcatggccaggcagatggtgttgagcaggatgaggacgaacatcaggtactcgaagtaggtggagttgaccacgtaccacactttgtactggtgctggttcttggggatgtacctccgcaggggccgggccttgagggcgtattccacgcactgtcgctggttcttgtccagctcacagttcttgtactcctgctccccctgctcctgaaaggtgacgatgacgaagcccacgaagatgttcatcatgaagaaggcgatgatgatgatgtagatgatgaagaagatggagatctccacacggtagttgtagatggggcccttgtcttccgtgtgggagtcgatggagcggtacagcagctctggccacccttcgaaggtggagacggtgaagagggccatcatggctgccagaacattgtcaaagtcaaacttgctgttctcccagctgcggggttggatgatggggtggtcaacctccccgtctttgtacgtgatgtagttgcccttgcattccgcctctgtctgcttggaactgtctgaacaggtgtacagctttcccttgaagagctggaccccgatgcaggcaaacatgaactgcagcagggtggtgacaatcacgatgttcccgatggtccggatggcgacaaacacacactgaaccacatgctttagccccttggccctgttgatggccctcaggggcctgagtactcgcaggactcgcaagatcttcacgacattgattgcactggactggatgccaaaggagatgagggacacgctgaccaccagcaggtccaggatgttgaagtagttccggcagaaagaacccttgtgcaagaaagccccataagcagtcatcttaaggataatttctaatgtaaagatactagtgaagacatagtctgcattgcctaggatcttcagagcaatttcaatggtgaaaatggtggtaaaaacaatatcaaaataaaacagaatatggttcctgaaggaggtgtgctggaccgggtcctcagcagccagggaaatgctgctgagcagaatgaagaagaggatcaggttggtgaagatcgtgtcattgacaatgcggtggcactggaggcgaaacctgttgttagagctgaagatgaaaaacgcgctggcttctggcatgggcactgccttttccttaaggtgaagctcagagagtggtcgtgggcgagggccgacaggcatctctggctcctcctcatcctcttctcctgtagtttctgggttggggtaggggctcttatcctcattttcattgggctggaggtcatccatgttgatcttggtggcgggtggagactctccgtcagccgtgatggatttcagctcaatcttctcctccttggattcccccactgccggcttctccaccaactcttgtttcttctctgggctggcagtcctggccagcttctttctctccttctcctcttcctcctccttttgggcagatgtgaggctctcagcatcagccaggttgtccacagcaatggccaagaacacattcagtaggatatagtttccacagatgaagaggatgatgaagtaaatacagactaacatccctggaaaagaggggccgccataagccatgatcccatcatacatcaccgaattccagtcctccccggtcaggatctgaaacacagtgaggagggactgggggaagttatcgaatgtgctcctccgggtctgcatctcatcaaagttgaactttcctccaaagagctgcatccccaggagggagaagatgatgatgaagaggaagaggagaaggagcagggaggcgatggagcgcacagagttcagcaaggatgccaccaggttgctcaaggagttccagtacctcgtgatcttgaaaatcctcagcagccggacgcatctgagcacggagatgcccagtggggacatgatcttggtctccaccaggatggtctccaggatgccgccacacacgacgaagcagtcaaagcggttgaagagggacacgaagtaggcctgcaggcccaggctgtacatcttcaggagcatctctgccgtgaacagggccagcagggccttgtttgccgtgtcttggacttctgtgagccagttgggctggttgtagtgctcagaggcaatggtgagcgtgttgaggaacaccaggaaaatcaccagccagtagaagacattagacttgactgcggcgcggcacttccttctgcagaaccgattccaccggcgccagtagcggctgaactttgacttggagatccggtgggccagcctggccccgcagttttctccctcgatgtcacctccagccacgttttcggtgttgacggactcggtctcactggtgggcatgctcatgtttcggggcttctcctcatccatgccttcgtcctcattctcaggatcgatgtcttcggcctgagtgatccaatccaggtagcctttgagatcctcttctagctgctgcttctcccgcagcttctggaaatctccccgggccttggccttctccctctctttggaaaactctccgctaagcacaccgagaaccaagttaagtacaaaaaatgaccctatgatgattagtgtaacaaaatagatccagggccagtcccttcctacggcatcattgacccagtacagcacgtccgtccagccctccatggtgatgcactggaacaccgtgagcatggcgaaggcaaagttgtcaaagttggtgatgccgtgcttgggaccatcccagccgggcttgcacaccgtgccgttctggcactgccgcccgtggcccgtttccagcgcacaaggggaagggtcatcttctgctggaacatctgctatgccctcctggttgtagcaggtcttgtgcatcttccccatgaagagctccaagccgatgatggcgtagatgatgatgacaaacagcacaagcagggcgatgtgcagcagggggaccatggccttgatgatggaattcaggaccacctggagacttgggactccggacaccagccgcagggggcgcagcacgcggaaggccctcagcgccttcacatcaaatccggcccctttccctccgagagcgtttgccccatctgctttggttgcttgttctaaaattgcactaaaaagccccacaaccacaattataaaatctagtaggttccagccgttgcggaggtaggcattggggtgaaagaggagtccataggcgattacttttaaaaacgcttccaccgtaaaaattatgagaaagagatattccactcgttccaggttggaattggtggcgttggaatcatcttctggaaagggaatatagatcgctaaggccacacaattggcaaaaatagtcagtaaaataattatttcaaatggtttccattcgacaatgctgatgcaggccctccggatggggttcttcagggtcaggcagagcagggctcggggcgggcgtgtggccgtggtgctgccctgcttcttgggtttcccatattgctgccgcttccgctgcgtggagctgactgtggagatggtcgcattgccagcgctgcccatcagcttagcctgccgggctgcgtcgatggccgcctgccacgacagggcagcccccggggtggggatgtgctcaggggccagccccgctgccgcattggcattcatgttggcatgggcggggcgtgggctcccatagttggaaccttggtggttttcctctggaatgtacatcctcgtattctcattgaccatggaccaaaaatggttttaataggaggagcagccacgaagaggaagaaatgtgaaaacaccccccggcgggtctggattaatccctcctccgaggccggcggctttcgcgcaagattcgaggaagccgtggtctgcagcgtttcttcttccccgccgacgattacctgattcccattatggcatcaaaccccaaaaactgctcctttccactactgcctcctcgagtgaaactgtaacgcatcctcagtacatccgggccccttccaagaactgagcaccgcacctccggcggctacaccatttgaaaaaataaatcgggagaggcagggcgagaagaggcggagaggaggggcggggggcgcgcggggcccgcctgggccggcaggggccgaggcgcctctgcccactcccagcgagtcctcctgaggcccctgcccggctctctgctgtcaaagggagccggcaactcctgggcgcggaggcaggaagagccgccgccgccgctccgggcccgccgcgccgcgccgagcgccgctctggcaggagctgtttctgcagaggcagcgagagggagac

SEQ ID NO: 13 - RNA, 13340 nt, Mus musculus
  source 1..13340: mol_type = mRNA
aaatctgaaagcagaagctcggattcacagctgagtgacagggccacatgagactttacagccttcaaatgtggtcacagagatcgtttgtgagtttttagaaagtacaaggaaaaattacaagtgggatacttgttcagttgtgaagtcagttgttggtacccaactggaagccacaatgattcgggcctttgttcagccatccacacccccataccagccactctccagtcactcgtctgaggaaacagagaggaagttcaagggcaaggtggtacatgaagctcaactcaactgtttctacatttctcctggaggttccaactatgggagcccacgcccagctcatgccaacatgaatgccaatgcagctgcaggacttgctcccgagcacatccctactccaggggcagcactgtcctggcaggcagccatcgatgccgcccggcaggccaagctcatgggcagtgctggcaacgcaaccatctctaccgtcagttccacacagcggaagcggcagcagtatgggaaacccaagaagcaggggggcacaaccgccacacggccgccccgggctctgctgtgtctgaccctgaagaaccctatccggagggcgtgcataagcattgttgaatggaaaccatttgaaatcattattttactgactatttttgccaattgtgtggccttagcaatctatattccctttccggaagacgactccaacgccaccaactccaacctggaacgagtggagtatctcttcctcatcatttttaccgtggaagcatttttaaaagtaattgcctacggacttctcttccaccccaacgcttacctccgcaatggttggaatttactggattttataatcgtggttgtagggctttttagtgcaattttagaacaagcaaccaaagctgatggggccaatgctctaggagggaaaggagctggattcgacgtgaaggcactgagagcgttccgcgtgctccgtccactgcggctagtgtccggagtcccaagtctccaggtggtcctgaactccatcatcaaggccatggtgcctctgctgcacattgcccttcttgtgctcttcgtcatcatcatttatgctattatcggcctggagctcttcatgggaaagatgcacaagacctgctacaaccaggagggcataatagatgttccggcagaagaggatccttccccttgtgctttggagacaggccatgggcgacagtgtcagaacgggaccgtgtgcaaacccgggtgggatgggcccaagcacggcatcaccaacttcgacaacttcgccttcgccatgctgacggtgttccagtgtatcaccatggagggctggacagacgtgctgtactggatgcaagacgctatgggctatgagttgccctgggtgtattttgtcagtctggtcatctttggatcctttttcgttctaaatctggttctcggtgttttgagcggggagttttccaaagagagggagaaagccaaagcccgaggagatttccagaagcttcgagagaagcagcaactagaagaagatctcaaaggctacctggactggatcacccaggcagaagacattgaccccgagaatgaggacgagggcatggatgaagacaagcctcgaaacatgagcatgcccacaagtgagactgagtctgtcaacactgaaaacgtggctggaggtgacatcgagggagaaaactgtggagccaggcttgcccatcggatctccaaatccaaattcagccgctactggcgcaggtggaatcgattctgcagaagaaaatgccgtgcagcagttaagtccaacgtcttctactggctcgtgatcttcctggtgttcctcaacaccctcaccattgcctccgaacattacaaccagcctcactggctcacagaagtgcaagacacagccaataaagccctcctggcccttttcactgcagaaatgctcctgaagatgtacagcctgggtcttcaggcctattttgtgtccctcttcaaccgctttgactgtttcattgtgtgtgggggcatcctggagaccatcctggtggagacgaagatcatgtctcccctgggcatctctgtgctgagatgtgtgcggttgctcaggatcttcaagatcaccaggtactggaattccttgagcaaccttgtggcatccttgctgaactcagtgcgctccattgcctccctgctgctgctcctcttcctcttcatcatcatcttctccctcctggggatgcagctctttggagggaagttcaatttcgatgagatgcagacccgtaggagcacgttcgataacttcccgcagtctctcctcactgtgtttcagatcctgaccggggaggactggaattcggtgatgtatgatgggatcatggcttatggcggcccctcttttccagggatgttagtctgtatttacttcatcatcctcttcatctgtggaaattatatcctactgaatgtgttcttggccattgcggtggacaacctggctgatgcggagagcctgacctcagcccaaaaggaggaggaagaagagaaggagaggaagaagctggccaggactgccagcccagaaaagaaacaggaggtgatggagaagccagccgtggaggagagcaaagaggagaaaattgaactgaaatccattacagccgatggagaatccccacccactaccaagatcaacatggatgacctccagcccagtgaaaacgaggataagagtccccactccaacccagacactgcaggggaagaggatgaagaggagccagagatgcctgtggggccacgcccccggcccctgtctgagctgcaccttaaggaaaaggcagttcccatgccggaagccagtgcatttttcatcttcagcccaaacaacaggttccgcctgcagtgccaccgtattgtcaatgacacgatcttcaccaacctcatcctcttcttcattctgctcagcagcatctctctggctgctgaggaccccgtccagcacacctccttcaggaaccatatcctaggcaatgcagactatgtcttcactagtatctttacattagaaattatccttaagatgactgcttacggggctttcctgcacaagggctctttctgccgaaactacttcaatatcctggacctgctggtggttagcgtgtccctcatctcctttggcatccagtccagcgcgatcaacgttgtgaagattttacgagtgctgcgagtcctcagacccctgagggccatcaacagggccaaggggctaaagcatgtggttcagtgcgtgtttgtggccatccggaccatcgggaacatcgtaattgtcaccactctgctgcagttcatgttcgcctgcattggggtccagctcttcaagggaaagctctatacctgttcggatagttctaaacagacggaggcagaatgcaagggtaactatatcacatacaaagatggagaggtcgatcaccccattatccagcctcgaagctgggagaacagcaagtttgactttgacaatgttttggcagccatgatggctctcttcaccgtctccaccttcgaagggtggccagagctgctgtaccgctccattgactcccacacagaagacaagggccccatctacaactaccgtgtggagatctccatcttcttcatcatctatatcatcatcattgccttcttcatgatgaacatcttcgtgggtttcgtcattgtcaccttccaggagcagggggaacaagagtacaagaactgtgagctggacaagaaccagagacaatgtgtggaatatgccctcaaggcccgacccttgcgaaggtacatccccaagaaccagcaccagtacaaagtgtggtacgtggtcaactctacctacttcgagtatctgatgttcgttctcatcctgctcaacaccatctgcctggccatgcagcactatggccagagctgcctcttcaaaatcgccatgaatatactcaacatgcttttcaccggcctcttcacagtggagatgatcctgaagctcattgccttcaaacccaagggttactttagtgatccctggaatgtttttgacttcctcatcgtcattgggagcataattgatgtcattctcagtgagactaatccagctgaacatacccaatgctctccctctatgagtgcagaggagaactcccgcatctccatcaccttcttccgcctcttccgggtcatgcgcctggtgaagctgctgagccgcggggaaggcatccgaaccctgctgtggaccttcatcaagtccttccaggctctgccctatgtggctcttttgattgtgatgctgttctttatctatgcagtgattgggatgcaggtgtttgggaagattgccctgaatgacaccacagagatcaatcggaacaacaacttccagacgttcccccaggctgtgttactgctgttcaggtgtgccaccggagaggcctggcaggacatcatgctggcctgcatgccaggcaagaagtgtgccccagagtctgagcccagcaacagcacggaaggggagaccccctgtggcagcagctttgctgtcttctacttcatcagcttctacatgctctgtgccttcctgatcatcaacctctttgtagctgttatcatggacaactttgactacctgactagggattggtctatcctcggtccccatcacctggatgaattcaagagaatctgggccgagtatgaccctgaagccaagggtcggatcaaacacttggatgtggtgaccctcctccgtcgaattcagcccccactgggttttgggaaattgtgtcctcaccgtgtggcctgcaaacgcctggtgtccatgaacatgcctctgaacagcgatggcacagtcatgttcaatgctaccctgtttgccctcgtcaggacagccctgaggatcaaaacagaagggaacctagagcaagccaatgaggagcttcgggccatcatcaagaaaatctggaagaggactagcatgaagctgttggaccaggtggtgccccctgcaggcgatgacgaggtcacagtgggcaagttctatgccaccttcctgatccaagagtacttcaggaaattcaagaagcgaaaagagcaggggctggtgggcaagccctcacaaaggaatgcactgtccctccaggctggcttgcgcaccttgcatgacattgggcctgagatccggcgggccatctctggggatctgactgctgaggaggagttggacaaggctatgaaggaggcggtgtctgctgcctccgaagatgacatcttcaggagggctggaggcctgttcggcaaccatgtcacctactatcagagtgacagcaggggcaactttcctcagacgttcgccacccagcgcccactgcacatcaacaagacagggaacaaccaagctgacactgagtcaccgtcccatgagaagctggtggactccacgttcacccccagcagctactcatccacgggctccaatgccaacatcaacaatgccaacaacactgccctgggccgcttcccccatcccgctggctactccagcacggtcagcactgtggagggccatgggcctcccttgtcccctgctgtccgagtacaggaggcagcatggaagctcagctctaagaggtgccactcccgagagagccagggagccacggtgaatcaggagatatttccagatgagacccgcagcgtaaggatgagtgaagaagccgagtactgcagtgagcccagcctgctctccacagatatgttctcctaccaggaagatgaacaccgacaactgacctgcccagaggaggacaagagggagatccagccatctccaaagaggagtttccttcgctctgcctctctaggtcgaagggcctccttccatctggaatgtctaaagcgacaaaaggatcaagggggagacatctctcagaagacagccttgcccttgcatctggttcatcatcaggcattggcagtggcaggcttgagccccctcctgcagagaagccattctcctaccacattccccaggccgtgccccacaccccctgtcactccaggcagccggggcagacccctacggcccatccctaccctacggctggagggggcagagtccagcgagaaactcaacagcagcttcccatccatccactgcagctcctggtctgaggagacgacagcctgtagtgggagcagcagcatggcccggagagcccggcccgtctccctcaccgtgcccagccaggctggagctccagggagacagttccatggcagtgccagcagcctggtggaagcggtcttgatttcagaaggactgggacagtttgctcaagatcccaagttcatcgaggtcaccacccaggagctggctgacgcctgcgacatgacaatagaggagatggagaacgccgcagacaacatcctcagtgggggcgcccagcagagccccaacggcaccctcttaccttttgtgaactgcagggacccggggcaggacagggctgtggccccagaggacgagagctgcgcatatgccctggggcgaggccggagcgaggaggcgctcgcggacagcaggtcctacgtcagcaacctgtagtcctcagggctggcgagacgcgggtggtttttttattcgtttcaatgttcctaatgggttcgtttcagaagtgcctcactgttctcgtgacctggaggtaaccggaacagcgtcttcattcactgctgtcgggataagcctcagagctgggcggtgtacggagtcggcttttcaggggagaaggccaaggccgtggtgcgggggctccagcaccttccgcggcagcaccgcccaaaggaccccacccccacccctgagcaaaagggtgttttccccttgcttgtataaacagtcatttgcacatgttctgtctgagcctggccgtctctatggagcagggccccagggatctatggcaggaatgggccagcgcccccagtaggagccgggaggtggctgcgaggttcccagcagtgcaggtctggtccctatggtcccttcagggactctttccctgcaaggagctgagatgcaggtggcaggagccagtgcagatcacaccacccgccctcagctagccaggccaggggggcgcaggctgctgcctggtgctcggggtttcatggtttgagggttcttgtcagcatgttgcgactttctggggtttggtttctttattactatttgttgtgttttcccacggggaggggaggaataagagcggttacaactgcgcggcctcacttcactgtttccacatttgcatttgcgtatttaagtcggatttggtttgattgtattctttaaatggtgcggtccacccccaccgccacccccaccccccactggagcaagggttcaatatcaccagagaaaggttttacctgctctgtgtctgcccagtaacttgttccaatttccttaagtaaaagcaacttttttctttctttcgagtttggttgagcatcacaatcagcaggctaacaggcagttagatcaggcggtgtgcgcctgggcgattgagctgggctcctttctgtgctgggcatatggactggttcaagagagaagaaatatgggcatctttgtgtcacacttgtgtccatagtatgtgcgtatgtgcacccacgtggtatgtgtgcgccccaccccacccctgcacaaaagcctgtagaaccccgtttgggtttgactgcagggagttctaaatctggggctatttgaaagcaagaacaaaccactgtctctgcttctgcttctgaaacgagaatcggtaactgcatttttctgtcccacgagatatgcaaaagcaatgcaataatatccattttaaaatatggttgtgagttgtgtcagcattaaaattctattttaaaaaaaaaaccacgaaatttaagggaaaaactcaagaagacattttgcttcgatatattctgtgtaatgttttattgcattgataatgtttctgttgaagaaactgttatacttgaattcaggtcagtttcagtatttttcaaatatttttttaaaactgaattgcaattgtgccaagcaaatacaatgacttaagtttgttttaaaattcacttcttgtatattttgctgcatgtaaagtaaatcgttttgtatttggagtgtgaaaagctttacctttgagctcttaagtgcttcttctgtacgtggttggggggaaagatggtttttctttcatttgcaaagtgaacaaaggtgtccccggtgtaagtcctcactctgctttccagagagaggggaggtgccattttgcatatcttgtgttttgtttccatatccctcagttatttccaaaacccagtggtaaggttgcccatgccgaatcttgcttttcgaggtcaggacgtgttccacccagctcttctgctgtcttctgctcttctctgtggattcttgtccaatgttccagcatcccgtgggaagaggtggctggctttcccaagcactgtcacagcatatatctcaactgagaggatgcggtaaccatcagacggggacagtggtgggatagactcacctttgacccatgattagcccaaacacagacagccatagttgggagctggtgagcagtcactggatggaactgtagcccttgtaaaaactattcatcctttccatctcctgaagcagggaggcagagaagcatgggatcgagaccagggtgggagcaccaggatctcacagggatgaaagaaacagatacatgaggctttcacttaggatcctcagtatctgccttcaacaacccttacgattagtgctaggtccttctattgtgtcttaataagaatggttgaaaaggaagggctttgaggaaaataagactcaaccattcgctcagattttgcctacggagtatcttccagtcccagtgacctaccagccttttatggagatcatgtgagaatctgctcgaaattccagcaaggatgttcctccgtggcaatgagtctgctcttgtgaatgttcacggggttaagcggagtgtagaaacagcctttctccttggatttccatatgtggttgaccgagcatttatgcagcctttgtagcacccataagggcttctagagataataattagatggtgtcctttgtcttgtttctgcgaagttctgcgactgtgttgatgagtctttagtggtagaaagggagccctactgactggctgtgtggttcttctttgcatctgactcccccccaccagagaaatgtggtattctcattgaccctacacacaagcatgcataccctgcatactcaatctcttcctgctgccttgtatcttcctttgaacactttgatctgcattgccagatcccattgatcaaagatataagctacaagctgagtcccagcatcccccgccagaactctgcccagtgtcatgcccaacccaccctcctttcaccagccatacccacagactgctttctccttgtgccaaggaaactgaagtagcctttcactcatacagggacaatggaccccttgcccttcgttgctagaaggaaagaaggttcagtggacaggatctttcatacttggcttcatgactacctggataaaaatgacaaatgctacctgtcaccaggacagtagggaacagtgtctaagaaaaccagtggacatctacaccagattatcaactctccacccaacatggaattttcccaatgactgttttgaacataattatcaaaccttctgcaatcctgacaatttctggatggcagcagaattagcctgcagctggggaccaaaggggcacgaaggagtgtagatcgtgtgtttttatctgtcctatgacaatctctgtctcttttgtttatgatcttgtcgtgtgtgtatgtgtgtgtgtgtgtccatgacacagtccaagtaacagacaagtccagttaaatccctttctgcctggtcctaggttgttcgtatcttcaaatgaaaaagagagagattttcctaggccttgtttgattcataaacatttttttctattagttggggttcccatcttcttaatctgactaggaacccaaggcccaactgtgtcttttaccctcctctggtgccttggttccaaattctggaacttgtatgaagagaaggtctacattcctttctcacacttctcaaccatccagagctctggagaagtccaactgaacacagtagatagcccttcctttgccaaagtcagcacattcctggaacagtcaggaaatcagtagaaagaacgtggctggtgagtagaggccaagtgacaaacccctactgctcctaaatttgggcctagagaacaaggatctaggtcaagtatggagtaaactctctggcaatcagggtttttagccttatcataccagttttcagacatctccaaggagaaggatggcccctctctccctgagtgattgaaatgtcctcaatcatcagctagaaaaacattgagcaaggagctgtggaaggagtgtctggatttcaaaagagctactccaagcccacggaagctgatgttaagtgtcctgaccaattctgttcttcaacaagccccagctctgaaacaggtgtcagcagcaagagaactagaggggtggggagtgaggaaaggtcaagccttaaaccccaccaccaccaggtcatctcactgtatggaaagctcttctgtgtggtcactctgttgccagccttggcaaaggctgacggctccatagtctgctttggaaattatggggggaaaaaaatcctaccctaggtgtttttccagccagataacctagctagagaaatgtggcccttgcctggccctgggatgcccctccactgtgtctgccaaagaatttgccaatggagaagtagttgggggagcttggctctcactcgataaggtccatgttctacagctggtgccctggggaaacgtatcctggaaggtgtgacgggaaaaccaccctacctatgatgtcagtaaagggcacaatcccctccttgagcatttcatcattcctccccctccccctcctccccctatttcccgtcctcccctctccctccttctcttccttctcatctacctgctcatccctttcttctctgcttcttcctctcttttacctgtcctcctcctcctcttcttcctctacaaacccagtgaagggaacagaggtgaaaggaactcactggagattctcacaatgtttttgtttatttgtttgtttgtttgtttgttttgtgtgccatattgtcaccttgttaggaagtcagttgaatgccacacacacacacacacacacacacacacacacacacacaggtataagtgctggaggtaatggccacatagtgattttttttttcctacagaaggggagggctgtggtcagcatgttcaacctgtttaatgtgtggctgtgtgtcccagaacacctgtgaatatgacccagtacatttatagctgatgtcctattagaacagaaaagcactgcgcacctttgaagagggacacgtggaagaaactagaacagtttccacaggtagaaatagggcccgtgttcttcatctacactgaggaaatgctgccactcttaagcccacccttttcctccaactgtcttaagaagtttgatccacatagtatgtgaaaaagagcctggtcttcctggtgtgttaggaagacctgttaagccatctcgggaagggagttggagaatggagctgaacagatcaagcattgcaaatcaattcagtgctgtgagtagtctcaactgagatctttctattacatttctcttaggtctccactagcaatcaggaagacaaggccaggtaaaacttggtgcagatatgaaatgtcatatcaccagaaccaaactgtctcagatgttcactgctttagaggtataaaccccacgtcctcatgagaaatcctagggcctgcaattcccccagaatgcaaaccacttgatggggcaaggcttacagaataggtggcatgccacttgatccaacataaatgaggcaattcttgcaaatttggcaccttaaatccccccatgcaccattcagcaggctcgtgacagggacagcttgggaatgcagaagccatagggaattggagggttgtttcttttcttttttcttttttcttttttttgtgtgtgtgggggtggggggagtgtgcaggtcctgggagttgaaccaagggctttatgcatgctaaacaagtgctttagctcttatttgagatagtctgtgtctcctaggatttcccagcatggagaaacacaccaaagttaaaagtagggagaaaccattggtaattaaggacagatggtttataagcaagtggtccctgcaaagggccccctagaaggcatcacggtgacccttgaactgtgggcacctttctgttctgcacaccacacacatccacagctgcaccagcccctcagacttgaaatccacctaccagaccatgcacccatctgtcttaccctgcttggacatttggtatttttggtttgtttgtttttatttgcccacttctctgagcaaagcacagatgacagagaaacagtgaggtttatacatctctgtgatcacagcagttaagaacaacctgtgggaagaaatagtctttgaaaaatggatggcagagccctggagtgagtgctgcaatgtctgctgctctcagaaattcagcctgccagtgttactaaggaaaacttccctccgtgaaaagggtcacataaagccgctccccatatgtgtactcagtccacttttatgtccccaagaaaacctgtcatgtgccatgcctgttcccagaggcatggaaagatgaacaggcctctagaccactcatacacacctgcccatcccacacctgcccctccaggctccacgacaccacagtctgactgttgtaaatattgttgtacagtttgtaatcaaatactcatgtcgtcaaaggccctgcctgctgcgccttctcccccctcgagcaaggccagggaaactagaagggaaacccttcgaggagagcttcagggtccatctctgtgtgagacgctactgtatattcctgtaagattgcatttttatctaaggaatgatgttatttaaaaaacaaacaaaaacgcaaaaaagaattgcaaataaatttcttaacaatgtc

SEQ ID NO: 14 - RNA, 13340 nt, Mus musculus
  source 1..13340: mol_type = mRNA
gacattgttaagaaatttatttgcaattcttttttgcgtttttgtttgttttttaaataacatcattccttagataaaaatgcaatcttacaggaatatacagtagcgtctcacacagagatggaccctgaagctctcctcgaagggtttcccttctagtttccctggccttgctcgaggggggagaaggcgcagcaggcagggcctttgacgacatgagtatttgattacaaactgtacaacaatatttacaacagtcagactgtggtgtcgtggagcctggaggggcaggtgtgggatgggcaggtgtgtatgagtggtctagaggcctgttcatctttccatgcctctgggaacaggcatggcacatgacaggttttcttggggacataaaagtggactgagtacacatatggggagcggctttatgtgacccttttcacggagggaagttttccttagtaacactggcaggctgaatttctgagagcagcagacattgcagcactcactccagggctctgccatccatttttcaaagactatttcttcccacaggttgttcttaactgctgtgatcacagagatgtataaacctcactgtttctctgtcatctgtgctttgctcagagaagtgggcaaataaaaacaaacaaaccaaaaataccaaatgtccaagcagggtaagacagatgggtgcatggtctggtaggtggatttcaagtctgaggggctggtgcagctgtggatgtgtgtggtgtgcagaacagaaaggtgcccacagttcaagggtcaccgtgatgccttctagggggccctttgcagggaccacttgcttataaaccatctgtccttaattaccaatggtttctccctacttttaactttggtgtgtttctccatgctgggaaatcctaggagacacagactatctcaaataagagctaaagcacttgtttagcatgcataaagcccttggttcaactcccaggacctgcacactccccccacccccacacacacaaaaaaaagaaaaaagaaaaaagaaaagaaacaaccctccaattccctatggcttctgcattcccaagctgtccctgtcacgagcctgctgaatggtgcatggggggatttaaggtgccaaatttgcaagaattgcctcatttatgttggatcaagtggcatgccacctattctgtaagccttgccccatcaagtggtttgcattctgggggaattgcaggccctaggatttctcatgaggacgtggggtttatacctctaaagcagtgaacatctgagacagtttggttctggtgatatgacatttcatatctgcaccaagttttacctggccttgtcttcctgattgctagtggagacctaagagaaatgtaatagaaagatctcagttgagactactcacagcactgaattgatttgcaatgcttgatctgttcagctccattctccaactcccttcccgagatggcttaacaggtcttcctaacacaccaggaagaccaggctctttttcacatactatgtggatcaaacttcttaagacagttggaggaaaagggtgggcttaagagtggcagcatttcctcagtgtagatgaagaacacgggccctatttctacctgtggaaactgttctagtttcttccacgtgtccctcttcaaaggtgcgcagtgcttttctgttctaataggacatcagctataaatgtactgggtcatattcacaggtgttctgggacacacagccacacattaaacaggttgaacatgctgaccacagccctccccttctgtaggaaaaaaaaaatcactatgtggccattacctccagcacttatacctgtgtgtgtgtgtgtgtgtgtgtgtgtgtgtgtgtgtgtggcattcaactgacttcctaacaaggtgacaatatggcacacaaaacaaacaaacaaacaaacaaataaacaaaaacattgtgagaatctccagtgagttcctttcacctctgttcccttcactgggtttgtagaggaagaagaggaggaggaggacaggtaaaagagaggaagaagcagagaagaaagggatgagcaggtagatgagaaggaagagaaggagggagaggggaggacgggaaatagggggaggagggggagggggaggaatgatgaaatgctcaaggaggggattgtgccctttactgacatcataggtagggtggttttcccgtcacaccttccaggatacgtttccccagggcaccagctgtagaacatggaccttatcgagtgagagccaagctcccccaactacttctccattggcaaattctttggcagacacagtggaggggcatcccagggccaggcaagggccacatttctctagctaggttatctggctggaaaaacacctagggtaggatttttttccccccataatttccaaagcagactatggagccgtcagcctttgccaaggctggcaacagagtgaccacacagaagagctttccatacagtgagatgacctggtggtggtggggtttaaggcttgacctttcctcactccccacccctctagttctcttgctgctgacacctgtttcagagctggggcttgttgaagaacagaattggtcaggacacttaacatcagcttccgtgggcttggagtagctcttttgaaatccagacactccttccacagctccttgctcaatgtttttctagctgatgattgaggacatttcaatcactcagggagagaggggccatccttctccttggagatgtctgaaaactggtatgataaggctaaaaaccctgattgccagagagtttactccatacttgacctagatccttgttctctaggcccaaatttaggagcagtaggggtttgtcacttggcctctactcaccagccacgttctttctactgatttcctgactgttccaggaatgtgctgactttggcaaaggaagggctatctactgtgttcagttggacttctccagagctctggatggttgagaagtgtgagaaaggaatgtagaccttctcttcatacaagttccagaatttggaaccaaggcaccagaggagggtaaaagacacagttgggccttgggttcctagtcagattaagaagatgggaaccccaactaatagaaaaaaatgtttatgaatcaaacaaggcctaggaaaatctctctctttttcatttgaagatacgaacaacctaggaccaggcagaaagggatttaactggacttgtctgttacttggactgtgtcatggacacacacacacacatacacacacgacaagatcataaacaaaagagacagagattgtcataggacagataaaaacacacgatctacactccttcgtgcccctttggtccccagctgcaggctaattctgctgccatccagaaattgtcaggattgcagaaggtttgataattatgttcaaaacagtcattgggaaaattccatgttgggtggagagttgataatctggtgtagatgtccactggttttcttagacactgttccctactgtcctggtgacaggtagcatttgtcatttttatccaggtagtcatgaagccaagtatgaaagatcctgtccactgaaccttctttccttctagcaacgaagggcaaggggtccattgtccctgtatgagtgaaaggctacttcagtttccttggcacaaggagaaagcagtctgtgggtatggctggtgaaaggagggtgggttgggcatgacactgggcagagttctggcgggggatgctgggactcagcttgtagcttatatctttgatcaatgggatctggcaatgcagatcaaagtgttcaaaggaagatacaaggcagcaggaagagattgagtatgcagggtatgcatgcttgtgtgtagggtcaatgagaataccacatttctctggtgggggggagtcagatgcaaagaagaaccacacagccagtcagtagggctccctttctaccactaaagactcatcaacacagtcgcagaacttcgcagaaacaagacaaaggacaccatctaattattatctctagaagcccttatgggtgctacaaaggctgcataaatgctcggtcaaccacatatggaaatccaaggagaaaggctgtttctacactccgcttaaccccgtgaacattcacaagagcagactcattgccacggaggaacatccttgctggaatttcgagcagattctcacatgatctccataaaaggctggtaggtcactgggactggaagatactccgtaggcaaaatctgagcgaatggttgagtcttattttcctcaaagcccttccttttcaaccattcttattaagacacaatagaaggacctagcactaatcgtaagggttgttgaaggcagatactgaggatcctaagtgaaagcctcatgtatctgtttctttcatccctgtgagatcctggtgctcccaccctggtctcgatcccatgcttctctgcctccctgcttcaggagatggaaaggatgaatagtttttacaagggctacagttccatccagtgactgctcaccagctcccaactatggctgtctgtgtttgggctaatcatgggtcaaaggtgagtctatcccaccactgtccccgtctgatggttaccgcatcctctcagttgagatatatgctgtgacagtgcttgggaaagccagccacctcttcccacgggatgctggaacattggacaagaatccacagagaagagcagaagacagcagaagagctgggtggaacacgtcctgacctcgaaaagcaagattcggcatgggcaaccttaccactgggttttggaaataactgagggatatggaaacaaaacacaagatatgcaaaatggcacctcccctctctctggaaagcagagtgaggacttacaccggggacacctttgttcactttgcaaatgaaagaaaaaccatctttccccccaaccacgtacagaagaagcacttaagagctcaaaggtaaagcttttcacactccaaatacaaaacgatttactttacatgcagcaaaatatacaagaagtgaattttaaaacaaacttaagtcattgtatttgcttggcacaattgcaattcagttttaaaaaaatatttgaaaaatactgaaactgacctgaattcaagtataacagtttcttcaacagaaacattatcaatgcaataaaacattacacagaatatatcgaagcaaaatgtcttcttgagtttttcccttaaatttcgtggttttttttttaaaatagaattttaatgctgacacaactcacaaccatattttaaaatggatattattgcattgcttttgcatatctcgtgggacagaaaaatgcagttaccgattctcgtttcagaagcagaagcagagacagtggtttgttcttgctttcaaatagccccagatttagaactccctgcagtcaaacccaaacggggttctacaggcttttgtgcaggggtggggtggggcgcacacataccacgtgggtgcacatacgcacatactatggacacaagtgtgacacaaagatgcccatatttcttctctcttgaaccagtccatatgcccagcacagaaaggagcccagctcaatcgcccaggcgcacaccgcctgatctaactgcctgttagcctgctgattgtgatgctcaaccaaactcgaaagaaagaaaaaagttgcttttacttaaggaaattggaacaagttactgggcagacacagagcaggtaaaacctttctctggtgatattgaacccttgctccagtggggggtgggggtggcggtgggggtggaccgcaccatttaaagaatacaatcaaaccaaatccgacttaaatacgcaaatgcaaatgtggaaacagtgaagtgaggccgcgcagttgtaaccgctcttattcctcccctccccgtgggaaaacacaacaaatagtaataaagaaaccaaaccccagaaagtcgcaacatgctgacaagaaccctcaaaccatgaaaccccgagcaccaggcagcagcctgcgcccccctggcctggctagctgagggcgggtggtgtgatctgcactggctcctgccacctgcatctcagctccttgcagggaaagagtccctgaagggaccatagggaccagacctgcactgctgggaacctcgcagccacctcccggctcctactgggggcgctggcccattcctgccatagatccctggggccctgctccatagagacggccaggctcagacagaacatgtgcaaatgactgtttatacaagcaaggggaaaacacccttttgctcaggggtgggggtggggtcctttgggcggtgctgccgcggaaggtgctggagcccccgcaccacggccttggccttctcccctgaaaagccgactccgtacaccgcccagctctgaggcttatcccgacagcagtgaatgaagacgctgttccggttacctccaggtcacgagaacagtgaggcacttctgaaacgaacccattaggaacattgaaacgaataaaaaaaccacccgcgtctcgccagccctgaggactacaggttgctgacgtaggacctgctgtccgcgagcgcctcctcgctccggcctcgccccagggcatatgcgcagctctcgtcctctggggccacagccctgtcctgccccgggtccctgcagttcacaaaaggtaagagggtgccgttggggctctgctgggcgcccccactgaggatgttgtctgcggcgttctccatctcctctattgtcatgtcgcaggcgtcagccagctcctgggtggtgacctcgatgaacttgggatcttgagcaaactgtcccagtccttctgaaatcaagaccgcttccaccaggctgctggcactgccatggaactgtctccctggagctccagcctggctgggcacggtgagggagacgggccgggctctccgggccatgctgctgctcccactacaggctgtcgtctcctcagaccaggagctgcagtggatggatgggaagctgctgttgagtttctcgctggactctgccccctccagccgtagggtagggatgggccgtaggggtctgccccggctgcctggagtgacagggggtgtggggcacggcctggggaatgtggtaggagaatggcttctctgcaggagggggctcaagcctgccactgccaatgcctgatgatgaaccagatgcaagggcaaggctgtcttctgagagatgtctcccccttgatccttttgtcgctttagacattccagatggaaggaggcccttcgacctagagaggcagagcgaaggaaactcctctttggagatggctggatctccctcttgtcctcctctgggcaggtcagttgtcggtgttcatcttcctggtaggagaacatatctgtggagagcaggctgggctcactgcagtactcggcttcttcactcatccttacgctgcgggtctcatctggaaatatctcctgattcaccgtggctccctggctctctcgggagtggcacctcttagagctgagcttccatgctgcctcctgtactcggacagcaggggacaagggaggcccatggccctccacagtgctgaccgtgctggagtagccagcgggatgggggaagcggcccagggcagtgttgttggcattgttgatgttggcattggagcccgtggatgagtagctgctgggggtgaacgtggagtccaccagcttctcatgggacggtgactcagtgtcagcttggttgttccctgtcttgttgatgtgcagtgggcgctgggtggcgaacgtctgaggaaagttgcccctgctgtcactctgatagtaggtgacatggttgccgaacaggcctccagccctcctgaagatgtcatcttcggaggcagcagacaccgcctccttcatagccttgtccaactcctcctcagcagtcagatccccagagatggcccgccggatctcaggcccaatgtcatgcaaggtgcgcaagccagcctggagggacagtgcattcctttgtgagggcttgcccaccagcccctgctcttttcgcttcttgaatttcctgaagtactcttggatcaggaaggtggcatagaacttgcccactgtgacctcgtcatcgcctgcagggggcaccacctggtccaacagcttcatgctagtcctcttccagattttcttgatgatggcccgaagctcctcattggcttgctctaggttcccttctgttttgatcctcagggctgtcctgacgagggcaaacagggtagcattgaacatgactgtgccatcgctgttcagaggcatgttcatggacaccaggcgtttgcaggccacacggtgaggacacaatttcccaaaacccagtgggggctgaattcgacggaggagggtcaccacatccaagtgtttgatccgacccttggcttcagggtcatactcggcccagattctcttgaattcatccaggtgatggggaccgaggatagaccaatccctagtcaggtagtcaaagttgtccatgataacagctacaaagaggttgatgatcaggaaggcacagagcatgtagaagctgatgaagtagaagacagcaaagctgctgccacagggggtctccccttccgtgctgttgctgggctcagactctggggcacacttcttgcctggcatgcaggccagcatgatgtcctgccaggcctctccggtggcacacctgaacagcagtaacacagcctgggggaacgtctggaagttgttgttccgattgatctctgtggtgtcattcagggcaatcttcccaaacacctgcatcccaatcactgcatagataaagaacagcatcacaatcaaaagagccacatagggcagagcctggaaggacttgatgaaggtccacagcagggttcggatgccttccccgcggctcagcagcttcaccaggcgcatgacccggaagaggcggaagaaggtgatggagatgcgggagttctcctctgcactcatagagggagagcattgggtatgttcagctggattagtctcactgagaatgacatcaattatgctcccaatgacgatgaggaagtcaaaaacattccagggatcactaaagtaacccttgggtttgaaggcaatgagcttcaggatcatctccactgtgaagaggccggtgaaaagcatgttgagtatattcatggcgattttgaagaggcagctctggccatagtgctgcatggccaggcagatggtgttgagcaggatgagaacgaacatcagatactcgaagtaggtagagttgaccacgtaccacactttgtactggtgctggttcttggggatgtaccttcgcaagggtcgggccttgagggcatattccacacattgtctctggttcttgtccagctcacagttcttgtactcttgttccccctgctcctggaaggtgacaatgacgaaacccacgaagatgttcatcatgaagaaggcaatgatgatgatatagatgatgaagaagatggagatctccacacggtagttgtagatggggcccttgtcttctgtgtgggagtcaatggagcggtacagcagctctggccacccttcgaaggtggagacggtgaagagagccatcatggctgccaaaacattgtcaaagtcaaacttgctgttctcccagcttcgaggctggataatggggtgatcgacctctccatctttgtatgtgatatagttacccttgcattctgcctccgtctgtttagaactatccgaacaggtatagagctttcccttgaagagctggaccccaatgcaggcgaacatgaactgcagcagagtggtgacaattacgatgttcccgatggtccggatggccacaaacacgcactgaaccacatgctttagccccttggccctgttgatggccctcaggggtctgaggactcgcagcactcgtaaaatcttcacaacgttgatcgcgctggactggatgccaaaggagatgagggacacgctaaccaccagcaggtccaggatattgaagtagtttcggcagaaagagcccttgtgcaggaaagccccgtaagcagtcatcttaaggataatttctaatgtaaagatactagtgaagacatagtctgcattgcctaggatatggttcctgaaggaggtgtgctggacggggtcctcagcagccagagagatgctgctgagcagaatgaagaagaggatgaggttggtgaagatcgtgtcattgacaatacggtggcactgcaggcggaacctgttgtttgggctgaagatgaaaaatgcactggcttccggcatgggaactgccttttccttaaggtgcagctcagacaggggccgggggcgtggccccacaggcatctctggctcctcttcatcctcttcccctgcagtgtctgggttggagtggggactcttatcctcgttttcactgggctggaggtcatccatgttgatcttggtagtgggtggggattctccatcggctgtaatggatttcagttcaattttctcctctttgctctcctccacggctggcttctccatcacctcctgtttcttttctgggctggcagtcctggccagcttcttcctctccttctcttcttcctcctccttttgggctgaggtcaggctctccgcatcagccaggttgtccaccgcaatggccaagaacacattcagtaggatataatttccacagatgaagaggatgatgaagtaaatacagactaacatccctggaaaagaggggccgccataagccatgatcccatcatacatcaccgaattccagtcctccccggtcaggatctgaaacacagtgaggagagactgcgggaagttatcgaacgtgctcctacgggtctgcatctcatcgaaattgaacttccctccaaagagctgcatccccaggagggagaagatgatgatgaagaggaagaggagcagcagcagggaggcaatggagcgcactgagttcagcaaggatgccacaaggttgctcaaggaattccagtacctggtgatcttgaagatcctgagcaaccgcacacatctcagcacagagatgcccaggggagacatgatcttcgtctccaccaggatggtctccaggatgcccccacacacaatgaaacagtcaaagcggttgaagagggacacaaaataggcctgaagacccaggctgtacatcttcaggagcatttctgcagtgaaaagggccaggagggctttattggctgtgtcttgcacttctgtgagccagtgaggctggttgtaatgttcggaggcaatggtgagggtgttgaggaacaccaggaagatcacgagccagtagaagacgttggacttaactgctgcacggcattttcttctgcagaatcgattccacctgcgccagtagcggctgaatttggatttggagatccgatgggcaagcctggctccacagttttctccctcgatgtcacctccagccacgttttcagtgttgacagactcagtctcacttgtgggcatgctcatgtttcgaggcttgtcttcatccatgccctcgtcctcattctcggggtcaatgtcttctgcctgggtgatccagtccaggtagcctttgagatcttcttctagttgctgcttctctcgaagcttctggaaatctcctcgggctttggctttctccctctctttggaaaactccccgctcaaaacaccgagaaccagatttagaacgaaaaaggatccaaagatgaccagactgacaaaatacacccagggcaactcatagcccatagcgtcttgcatccagtacagcacgtctgtccagccctccatggtgatacactggaacaccgtcagcatggcgaaggcgaagttgtcgaagttggtgatgccgtgcttgggcccatcccacccgggtttgcacacggtcccgttctgacactgtcgcccatggcctgtctccaaagcacaaggggaaggatcctcttctgccggaacatctattatgccctcctggttgtagcaggtcttgtgcatctttcccatgaagagctccaggccgataatagcataaatgatgatgacgaagagcacaagaagggcaatgtgcagcagaggcaccatggccttgatgatggagttcaggaccacctggagacttgggactccggacactagccgcagtggacggagcacgcggaacgctctcagtgccttcacgtcgaatccagctcctttccctcctagagcattggccccatcagctttggttgcttgttctaaaattgcactaaaaagccctacaaccacgattataaaatccagtaaattccaaccattgcggaggtaagcgttggggtggaagagaagtccgtaggcaattacttttaaaaatgcttccacggtaaaaatgatgaggaagagatactccactcgttccaggttggagttggtggcgttggagtcgtcttccggaaagggaatatagattgctaaggccacacaattggcaaaaatagtcagtaaaataatgatttcaaatggtttccattcaacaatgcttatgcacgccctccggatagggttcttcagggtcagacacagcagagcccggggcggccgtgtggcggttgtgcccccctgcttcttgggtttcccatactgctgccgcttccgctgtgtggaactgacggtagagatggttgcgttgccagcactgcccatgagcttggcctgccgggcggcatcgatggctgcctgccaggacagtgctgcccctggagtagggatgtgctcgggagcaagtcctgcagctgcattggcattcatgttggcatgagctgggcgtgggctcccatagttggaacctccaggagaaatgtagaaacagttgagttgagcttcatgtaccaccttgcccttgaacttcctctctgtttcctcagacgagtgactggagagtggctggtatgggggtgtggatggctgaacaaaggcccgaatcattgtggcttccagttgggtaccaacaactgacttcacaactgaacaagtatcccacttgtaatttttccttgtactttctaaaaactcacaaacgatctctgtgaccacatttgaaggctgtaaagtctcatgtggccctgtcactcagctgtgaatccgagcttctgctttcagattt

SEQ ID NO: 15 - RNA, 8187 nt, Rattus norvegicus
  source 1..8187: mol_type = mRNA
ccttcaaacgtggccacagacattgtttctgagtttttaaaaagtacaaggaaaaatacaagtgggatagctgttcagttgtgacatcagctgttggtccccaactggagtcacaatgattcgggccttcgctcagccatccacacccccataccagccgctctccagttgcctgtctgaggacacagagaggaagttcaagggcaaggtggtacacgaagctcaactcaactgtttctacatttctcctggaggttccaactatgggagcccacgcccagctcatgccaacatgaatgccaatgcagctgcaggacttgcccccgagcacatccctactccaggggcagcactgtcctggcaggcagccatcgatgccgcccggcaggccaagttaatgggcagtgctggcaatgcgaccatctctaccgtcagttccacacagcggaagcggcagcagtatgggaaacccaagaagcaggggggcacaactgccacacggccgccccgggctctgctctgcctgactctgaagaaccccatcaggagggcatgcatcagcattgttgaatggaaatcatttgaaataattattttattgacgatttttgccaattgtgtggccttagcaatctatattccctttccggaagatgactccaacgccaccaactccaacctggaacgggtggagtatctcttcctcatcatttttaccgtggaagcatttttaaaagtgattgcctacggactactcttccaccccaacgcttacctccgcaacggttggaatttactagattttataatcgtggttgtagggctttttagtgcaattttagaacaagcaaccaaagctgacggggccaacgctctgggagggaaaggagcgggattcgatgtgaaggcactgagagctttccgtgtgcttcgtcccctgcggctggtgtctggagtcccaagtctccaggtggtcctgaactccatcatcaaggccatggtgcccctgctgcacattgccctcctcgtgctcttcgtcatcatcatctatgccattatcggcctggagctcttcatggggaagatgcacaagacctgctacaaccaggagggcataatagatgttccagcggaagaggatccctccccttgtgctttggagacaggccatgggcgacagtgtcagaacgggaccgtgtgcaagcccgggtgggatgggcccaagcacggcatcaccaacttcgacaacttcgccttcgccatgctgacggtgttccagtgtatcaccatggagggctggacagacgtgctgtactggatgcaagacgctatgggctatgagttgccctgggtgtattttgtcagtctggtcatctttggatcctttttcgttctaaatctggttctcggtgttttgagcggagagttttccaaagagagggagaaagccaaagctcgaggagacttccagaagcttcgtgagaagcagcagctagaagaagatctcaaaggctacctggactggatcacccaggcggaagacatagaccctgagaatgaggacgagggcatggatgaagacaaaccccgaaacatgagcatgcccacaagtgagactgagtctgtcaacaccgaaaacgtggctggaggtgacatcgagggtgaaaactgtggagcccggcttgcccaccggatctccaaatccaagttcagccgctactggcgccggtggaatagattctgcagaagaaagtgccgtgccgcagttaagtccaatgtcttctactggctggtgatcttcctggtgttcctcaacaccctcaccattgcctccgaacactacaaccagcctcattggctcacagaagtgcaagacacggccaacaaggccctcctggcccttttcacggcagaaatgctcctgaagatgtacagcctgggtctgcaggcctactttgtatccctcttcaaccgctttgactgtttcattgtgtgcgggggcatcctggagaccatcctggtggagacgaagatcatgtcgcccctgggcatctctgtgctgagatgtgtgcggctgctcaggattttcaagatcaccaggtactggaactccctgagcaacctcgtggcgtccttgctgaactcagtgcgctccatcgcctccctgctgctactcctcttcctcttcatcatcatcttctccctcctggggatgcagctgtttggtggaaagttcaactttgatgagatgcagacccgtaggagcacgtttgataacttcccacagtctctcctcactgtgtttcagatcctgaccggggaggactggaattcggtgatgtatgatgggatcatggcttatggcggcccctcttttccagggatgttagtctgtatttacttcatcatcctcttcatctgtggaaattatatcctactgaatgtgttcttggccattgcggtggacaacctggctgatgcggagagcctgacctctgcccaaaaagaggaagaagaagagaaggagagaaagaagctggccaggactgccagcccagaaaagaaacaggaggtgatggagaaaccagcagtagaggagagcaaagaggagaaaattgagctgaagtccattacagcagatggagaatccccacccactaccaagatcaacatggatgacctccagcccagtgaaaatgaggacaagagtccccactccaacccagacactgcaggtgaagaggatgaggaggagcccgagatgcctgtgggcccacgcccccggcccctgtctgagctgcaccttaaggaaaaggcagtccccatgccggaagccagtgcatttttcatcttcagcccaaacaacaggttccgcctgcagtgccaccgcattgtcaatgacacgatcttcaccaacctcatcctcttcttcattctgctcagtagcatctccctggcggctgaggaccccgtccagcacacctccttcaggaaccacattctgttttattttgacattgtttttaccaccattttcaccattgaaattgctctaaagatgactgcttacggggctttcctgcacaagggctctttctgccgaaattacttcaatatcctggacctgctggtggttagcgtgtccctcatctcctttggcattcagtccagcgcgatcaacgttgtgaagattttaagagtgcttcgtgtcctcaggcccctgagggccatcaacagggccaaggggctaaagcacgtcgttcagtgtgtgtttgtggccatccggaccattggaaacattgtaattgtcaccactctgctgcagttcatgttcgcctgcattggggtccagctcttcaagggaaagctctatacctgttcggatagttccaaacagacggaggcagaatgcaagggtaactatataacatacaaagacggagaagttgaccaccccattatccagcctcgaagttgggagaacagcaagttcgactttgacaatgttctggcagccatgatggccctctttaccgtctccaccttcgaggggtggccagagctgctgtaccgctccattgactcccacacagaagacaagggtcccatctacaactatcgtgtggagatctccatcttcttcatcatctacatcatcatcattgccttcttcatgatgaacatcttcgtgggtttcgtcattgtcaccttccaggagcagggggaacaagaatacaagaactgtgagctggacaagaaccagagacaatgtgtggaatatgccctcaaggcccgacccttgcgaaggtacatccccaagaaccagcaccagtacaaagtgtggtacgtggtcaactccacctacttcgagtatctgatgttcgtcctcatcctgctcaacaccatctgcctggccatgcagcactacggccagagctgcctcttcaaaatcgccatgaatatactcaacatgcttttcactggcctcttcacggtggagatgatcctgaagctcattgccttcaaacccaagcactatttctgtgatgcatggaatacatttgacgccttgattgttgtgggtagcattgttgatatagcaatcaccgaggtacacccagctgaacatacccaatgctctccctctatgagtgcagaggagaactcccgcatctccatcaccttcttccgcctcttccgggtcatgcgcctggtgaagctgctgagccgaggggaaggcatccggaccctgctgtggaccttcatcaagtccttccaggccctgccctatgtggcccttttgattgtgatgctgttctttatctatgcagtgattgggatgcaggtatttgggaagattgccctgaatgacaccacagagatcaatcggaacaacaacttccagacgttccctcaggctgtgctactgctcttcaggtgcgccactggggaggcctggcaggatatcatgctagcctgtatgccaggcaagaagtgtgctccagagtctgagcccagcaacagcacggaaggggagacaccctgtggcagcagtttcgctgtcttctacttcatcagcttctacatgctctgtgccttcctgatcatcaacctctttgtagctgttatcatggacaactttgactacctgactagggattggtctatccttggtccccatcacctggatgaattcaagagaatctgggccgaatatgaccctgaagccaagggtcggatcaaacacttggatgtggtgaccctcctccgtcgaattcagcccccactgggttttgggaagttgtgtcctcaccgtgtggcctgcaaacgcctggtgtccatgaacatgcctctgaacagtgatgggacggtcatgttcaatgctacactgtttgcccttgtcaggacagccctgaggatcaaaacagaagggaacctagagcaagccaatgaggagctgagagccatcatcaagaaaatctggaagaggaccagcatgaagctgttggaccaggtggtgccccctgcaggtgatgacgaggtcacagtgggcaagttctatgccaccttcctgatccaagagtacttcaggaaattcaagaagcgaaaagagcaggggctggtcggcaagccctcgcagaggaatgcactgtctctgcaggctggcttacgcaccttgcatgacattgggcctgagatccggagagccatctctggggatctgacggctgaggaggagctggacaaggctatgaaggaggcagtgtctgctgcctccgaagacgacatcttcaggagggctggaggcctgtttggcaaccacgtcagctactaccagagtgacagcaggagcaacttccctcagacgtttgccacccaacgcccactgcacatcaacaagacagggaacaaccaagcggacaccgaatcaccgtcccatgagaagctggtggactccactttcacccccagcagctactcatccacgggctccaatgccaacatcaacaatgccaacaacactgccctgggccgcttcccccaccctgctggctactccagcacggtcagcactgtggagggccatgggcctcccttgtcccctgctgtccgggtacaggaggcagcatggaaactcagctctaagaggtgccactcccgagagagccagggggccacggtgagtcaggatatgtttccagatgagacccgcagcagcgtgaggctgagcgaagaagttgagtactgcagtgagcccagcctgctctccacagatatactctcctaccaggacgatgaaaaccgacaactgacctgtctagaggaggacaagagggagatccagccatctccgaagaggagtttccttcgctctgcctctctaggtcgaagggcctccttccatctggaatgtctaaagcgacaaaaggatcaagggggagacatctctcagaagacagccttgcccttgcatctggttcatcaccaggcattggcagtggcaggcttgagccccctcctgcagagaagccattctccttccacgttccccaggccacgccccacgccccctgtcactccaggcagccggggcaggcccctacagcccatccctaccctgcggctggagggggcggagtccagtgagaaactcaacagcagcttcccgtccatccactgcagctcctggtcagaggagaccacagcctgtagtgggggcagcagcatggcccggagagcccggcccgtctccctcaccgtgcccagccaggctggagctccaggcagacagttccacggcagcgccagcagcctggtggaagcggtcttgatttcagaaggactgggacagtttgctcaagatcccaagttcatcgaggtcaccacacaggagctggctgacgcctgcgatatgacaatagaggagatggagaacgccgcagacaacatcctcagcgggggcgcccagcagagccccaacggcaccctcttaccttttgtgaactgcagggacccagggcaggacagggctgtggtcccagaggacgagagctgtgtatatgccctggggcgaggccggagcgaggaagcgctcccggacagcaggtcctatgtcagcaacctgtagtccgcagggctggcgagacgcgggtgttttttattcgtttcaatgttcctaatgggttcgtttcagaagtgcctcactgttctcgtgacctggaggtaaccggaacagcgtcttcattcactgctgtcgggataagcctcagagctgggcggtgtacgaagtcggcttttcaggggagaaggccaaggccgtggtgcgggggctccagcaccttcccacggcagcaccgcccaaaggaccccacccccccctaagcaaaagggtgttttccccttgcttgtataaacagtcatttgcacatgttctgtctgagcctggccgtctctatggagcagggccccagggatctatggcaggaatgggccagtgtccccagtaggagccggaaggtggctgcaaggttcccagcagtgcagatctggtccctatggtcccttcagggacccttcccctgctggaactgaggagcaggtggcaggagccagtgcagaccacaccacctgccctcagctagccagacctgggggcgcaggctgcttgcctggtgctctgggtttcatagtttgatggttcttgtcagcatgttgcggttttctaggttttgatttctttattactatttgttgtgttttcccacggggaggggaggaagaagagcgtttacaactgcgcagcctcacttcaccggttccacatttgcatatttaagttggatttggttttattgtattctttaaatggtgcggtccacccccaccctcacccctattggagcaagggttcattatcaccacggggaggttttacctgctctgtgtatgcccaagtaacgtgttacaattttccttaagtcaaagcaactttttttcccccttttcggtttggttgagcatcacgacctgcaggttaacagtcagtttagataaggcggtgtgtgcctgggcgactgagctgggctcctttctgggcatatggattggttcaggagagaagaaatatgggcatctttgcgtcacacgtgtgtccatagtgggtcgtcttgtgtgtctgtgcatccacacggtacgtgagcaccccaccccacccccgcacaaagtctgtagatccccgttcgggtttgactgcagggagttcaaaatctggggctattcgaaagcaagaacaaaccactgtctctgcttctgcttctgaaacgagaatctggtaactgcattttctgtcccacgagatatgcaaaagcaatgcaataatatccattttaaaatacgattgtgagttgtgtcagcattaaaattctattttaaaaaaacatgaaatttaaggggaaaaactcaagaagacattttgcttcgatatattctgtgtaatgttttattgcattgataatgtttctgttgaagaaactgttatacttgaattcaggtcagtttcagtatttttcaaatatttttttaaaactgaattgcaattgtgccaagcaaatataatgacttaagtttgttttaaaattcacttcttgtatattttgctgcatgtaaagtaaatcattttgtatttgg

SEQ ID NO: 16 - RNA, 8257 nt, Rattus norvegicus
  source 1..8257: mol_type = mRNA
ccaaatacaaaatgatttactttacatgcagcaaaatatacaagaagtgaattttaaaacaaacttaagtcattatatttgcttggcacaattgcaattcagttttaaaaaaatatttgaaaaatactgaaactgacctgaattcaagtataacagtttcttcaacagaaacattatcaatgcaataaaacattacacagaatatatcgaagcaaaatgtcttcttgagtttttccccttaaatttcatgtttttttaaaatagaattttaatgctgacacaactcacaatcgtattttaaaatggatattattgcattgcttttgcatatctcgtgggacagaaaatgcagttaccagattctcgtttcagaagcagaagcagagacagtggtttgttcttgctttcgaatagccccagattttgaactccctgcagtcaaacccgaacggggatctacagactttgtgcgggggtggggtggggtgctcacgtaccgtgtggatgcacagacacacaagacgacccactatggacacacgtgtgacgcaaagatgcccatatttcttctctcctgaaccaatccatatgcccagaaaggagcccagctcagtcgcccaggcacacaccgccttatctaaactgactgttaacctgcaggtcgtgatgctcaaccaaaccgaaaagggggaaaaaaagttgctttgacttaaggaaaattgtaacacgttacttgggcatacacagagcaggtaaaacctccccgtggtgataatgaacccttgctccaataggggtgagggtgggggtggaccgcaccatttaaagaatacaataaaaccaaatccaacttaaatatgcaaatgtggaaccggtgaagtgaggctgcgcagttgtaaacgctcttcttcctcccctccccgtgggaaaacacaacaaatagtaataaagaaatcaaaacctagaaaaccgcaacatgctgacaagaaccatcaaactatgaaacccagagcaccaggcaagcagcctgcgcccccaggtctggctagctgagggcaggtggtgtggtctgcactggctcctgccacctgctcctcagttccagcaggggaagggtccctgaagggaccatagggaccagatctgcactgctgggaaccttgcagccaccttccggctcctactggggacactggcccattcctgccatagatccctggggccctgctccatagagacggccaggctcagacagaacatgtgcaaatgactgtttatacaagcaaggggaaaacacccttttgcttaggggggggtggggtcctttgggcggtgctgccgtgggaaggtgctggagcccccgcaccacggccttggccttctcccctgaaaagccgacttcgtacaccgcccagctctgaggcttatcccgacagcagtgaatgaagacgctgttccggttacctccaggtcacgagaacagtgaggcacttctgaaacgaacccattaggaacattgaaacgaataaaaaacacccgcgtctcgccagccctgcggactacaggttgctgacataggacctgctgtccgggagcgcttcctcgctccggcctcgccccagggcatatacacagctctcgtcctctgggaccacagccctgtcctgccctgggtccctgcagttcacaaaaggtaagagggtgccgttggggctctgctgggcgcccccgctgaggatgttgtctgcggcgttctccatctcctctattgtcatatcgcaggcgtcagccagctcctgtgtggtgacctcgatgaacttgggatcttgagcaaactgtcccagtccttctgaaatcaagaccgcttccaccaggctgctggcgctgccgtggaactgtctgcctggagctccagcctggctgggcacggtgagggagacgggccgggctctccgggccatgctgctgcccccactacaggctgtggtctcctctgaccaggagctgcagtggatggacgggaagctgctgttgagtttctcactggactccgccccctccagccgcagggtagggatgggctgtaggggcctgccccggctgcctggagtgacagggggcgtggggcgtggcctggggaacgtggaaggagaatggcttctctgcaggagggggctcaagcctgccactgccaatgcctggtgatgaaccagatgcaagggcaaggctgtcttctgagagatgtctcccccttgatccttttgtcgctttagacattccagatggaaggaggcccttcgacctagagaggcagagcgaaggaaactcctcttcggagatggctggatctccctcttgtcctcctctagacaggtcagttgtcggttttcatcgtcctggtaggagagtatatctgtggagagcaggctgggctcactgcagtactcaacttcttcgctcagcctcacgctgctgcgggtctcatctggaaacatatcctgactcaccgtggccccctggctctctcgggagtggcacctcttagagctgagtttccatgctgcctcctgtacccggacagcaggggacaagggaggcccatggccctccacagtgctgaccgtgctggagtagccagcagggtgggggaagcggcccagggcagtgttgttggcattgttgatgttggcattggagcccgtggatgagtagctgctgggggtgaaagtggagtccaccagcttctcatgggacggtgattcggtgtccgcttggttgttccctgtcttgttgatgtgcagtgggcgttgggtggcaaacgtctgagggaagttgctcctgctgtcactctggtagtagctgacgtggttgccaaacaggcctccagccctcctgaagatgtcgtcttcggaggcagcagacactgcctccttcatagccttgtccagctcctcctcagccgtcagatccccagagatggctctccggatctcaggcccaatgtcatgcaaggtgcgtaagccagcctgcagagacagtgcattcctctgcgagggcttgccgaccagcccctgctcttttcgcttcttgaatttcctgaagtactcttggatcaggaaggtggcatagaacttgcccactgtgacctcgtcatcacctgcagggggcaccacctggtccaacagcttcatgctggtcctcttccagattttcttgatgatggctctcagctcctcattggcttgctctaggttcccttctgttttgatcctcagggctgtcctgacaagggcaaacagtgtagcattgaacatgaccgtcccatcactgttcagaggcatgttcatggacaccaggcgtttgcaggccacacggtgaggacacaacttcccaaaacccagtgggggctgaattcgacggaggagggtcaccacatccaagtgtttgatccgacccttggcttcagggtcatattcggcccagattctcttgaattcatccaggtgatggggaccaaggatagaccaatccctagtcaggtagtcaaagttgtccatgataacagctacaaagaggttgatgatcaggaaggcacagagcatgtagaagctgatgaagtagaagacagcgaaactgctgccacagggtgtctccccttccgtgctgttgctgggctcagactctggagcacacttcttgcctggcatacaggctagcatgatatcctgccaggcctccccagtggcgcacctgaagagcagtagcacagcctgagggaacgtctggaagttgttgttccgattgatctctgtggtgtcattcagggcaatcttcccaaatacctgcatcccaatcactgcatagataaagaacagcatcacaatcaaaagggccacatagggcagggcctggaaggacttgatgaaggtccacagcagggtccggatgccttcccctcggctcagcagcttcaccaggcgcatgacccggaagaggcggaagaaggtgatggagatgcgggagttctcctctgcactcatagagggagagcattgggtatgttcagctgggtgtacctcggtgattgctatatcaacaatgctacccacaacaatcaaggcgtcaaatgtattccatgcatcacagaaatagtgcttgggtttgaaggcaatgagcttcaggatcatctccaccgtgaagaggccagtgaaaagcatgttgagtatattcatggcgattttgaagaggcagctctggccgtagtgctgcatggccaggcagatggtgttgagcaggatgaggacgaacatcagatactcgaagtaggtggagttgaccacgtaccacactttgtactggtgctggttcttggggatgtaccttcgcaagggtcgggccttgagggcatattccacacattgtctctggttcttgtccagctcacagttcttgtattcttgttccccctgctcctggaaggtgacaatgacgaaacccacgaagatgttcatcatgaagaaggcaatgatgatgatgtagatgatgaagaagatggagatctccacacgatagttgtagatgggacccttgtcttctgtgtgggagtcaatggagcggtacagcagctctggccacccctcgaaggtggagacggtaaagagggccatcatggctgccagaacattgtcaaagtcgaacttgctgttctcccaacttcgaggctggataatggggtggtcaacttctccgtctttgtatgttatatagttacccttgcattctgcctccgtctgtttggaactatccgaacaggtatagagctttcccttgaagagctggaccccaatgcaggcgaacatgaactgcagcagagtggtgacaattacaatgtttccaatggtccggatggccacaaacacacactgaacgacgtgctttagccccttggccctgttgatggccctcaggggcctgaggacacgaagcactcttaaaatcttcacaacgttgatcgcgctggactgaatgccaaaggagatgagggacacgctaaccaccagcaggtccaggatattgaagtaatttcggcagaaagagcccttgtgcaggaaagccccgtaagcagtcatctttagagcaatttcaatggtgaaaatggtggtaaaaacaatgtcaaaataaaacagaatgtggttcctgaaggaggtgtgctggacggggtcctcagccgccagggagatgctactgagcagaatgaagaagaggatgaggttggtgaagatcgtgtcattgacaatgcggtggcactgcaggcggaacctgttgtttgggctgaagatgaaaaatgcactggcttccggcatggggactgccttttccttaaggtgcagctcagacaggggccgggggcgtgggcccacaggcatctcgggctcctcctcatcctcttcacctgcagtgtctgggttggagtggggactcttgtcctcattttcactgggctggaggtcatccatgttgatcttggtagtgggtggggattctccatctgctgtaatggacttcagctcaattttctcctctttgctctcctctactgctggtttctccatcacctcctgtttcttttctgggctggcagtcctggccagcttctttctctccttctcttcttcttcctctttttgggcagaggtcaggctctccgcatcagccaggttgtccaccgcaatggccaagaacacattcagtaggatataatttccacagatgaagaggatgatgaagtaaatacagactaacatccctggaaaagaggggccgccataagccatgatcccatcatacatcaccgaattccagtcctccccggtcaggatctgaaacacagtgaggagagactgtgggaagttatcaaacgtgctcctacgggtctgcatctcatcaaagttgaactttccaccaaacagctgcatccccaggagggagaagatgatgatgaagaggaagaggagtagcagcagggaggcgatggagcgcactgagttcagcaaggacgccacgaggttgctcagggagttccagtacctggtgatcttgaaaatcctgagcagccgcacacatctcagcacagagatgcccaggggcgacatgatcttcgtctccaccaggatggtctccaggatgcccccgcacacaatgaaacagtcaaagcggttgaagagggatacaaagtaggcctgcagacccaggctgtacatcttcaggagcatttctgccgtgaaaagggccaggagggccttgttggccgtgtcttgcacttctgtgagccaatgaggctggttgtagtgttcggaggcaatggtgagggtgttgaggaacaccaggaagatcaccagccagtagaagacattggacttaactgcggcacggcactttcttctgcagaatctattccaccggcgccagtagcggctgaacttggatttggagatccggtgggcaagccgggctccacagttttcaccctcgatgtcacctccagccacgttttcggtgttgacagactcagtctcacttgtgggcatgctcatgtttcggggtttgtcttcatccatgccctcgtcctcattctcagggtctatgtcttccgcctgggtgatccagtccaggtagcctttgagatcttcttctagctgctgcttctcacgaagcttctggaagtctcctcgagctttggctttctccctctctttggaaaactctccgctcaaaacaccgagaaccagatttagaacgaaaaaggatccaaagatgaccagactgacaaaatacacccagggcaactcatagcccatagcgtcttgcatccagtacagcacgtctgtccagccctccatggtgatacactggaacaccgtcagcatggcgaaggcgaagttgtcgaagttggtgatgccgtgcttgggcccatcccacccgggcttgcacacggtcccgttctgacactgtcgcccatggcctgtctccaaagcacaaggggagggatcctcttccgctggaacatctattatgccctcctggttgtagcaggtcttgtgcatcttccccatgaagagctccaggccgataatggcatagatgatgatgacgaagagcacgaggagggcaatgtgcagcaggggcaccatggccttgatgatggagttcaggaccacctggagacttgggactccagacaccagccgcaggggacgaagcacacggaaagctctcagtgccttcacatcgaatcccgctcctttccctcccagagcgttggccccgtcagctttggttgcttgttctaaaattgcactaaaaagccctacaaccacgattataaaatctagtaaattccaaccgttgcggaggtaagcgttggggtggaagagtagtccgtaggcaatcacttttaaaaatgcttccacggtaaaaatgatgaggaagagatactccacccgttccaggttggagttggtggcgttggagtcatcttccggaaagggaatatagattgctaaggccacacaattggcaaaaatcgtcaataaaataattatttcaaatgatttccattcaacaatgctgatgcatgccctcctgatggggttcttcagagtcaggcagagcagagcccggggcggccgtgtggcagttgtgcccccctgcttcttgggtttcccatactgctgccgcttccgctgtgtggaactgacggtagagatggtcgcattgccagcactgcccattaacttggcctgccgggcggcatcgatggctgcctgccaggacagtgctgcccctggagtagggatgtgctcgggggcaagtcctgcagctgcattggcattcatgttggcatgagctgggcgtgggctcccatagttggaacctccaggagaaatgtagaaacagttgagttgagcttcgtgtaccaccttgcccttgaacttcctctctgtgtcctcagacaggcaactggagagcggctggtatgggggtgtggatggctgagcgaaggcccgaatcattgtgactccagttggggaccaacagctgatgtcacaactgaacagctatcccacttgtatttttccttgtactttttaaaaactcagaaacaatgtctgtggccacgtttgaaggccataaaatctcatacggccttatcgcttggcagtgaatttgagcttttgctctcagatttagaattctg

SEQ ID NO: 17 - RNA, 13649 nt, Macaca mulatta
  source 1..13649: mol_type = mRNA
ggctgggagcagagcagggaagacagaaaatacaaggttgaaaagaatcaagcaagaaggtgttttgttttgttttgtttagaattctaaaatttaaaagtaattttactgtaacctaaacttgcagcgatatgatatggccatgtaaacttttgtggcactgaaatgttactgcaggaatggcttctgggttttaaaaaattacaagagatcatgagcagggtaattatttagctttaaaaatcaaccaattaatatacaactggaaattcacaatgcttcgagcctttgttcagcctggtacgcctgcataccagccgcttcccagccacctgtctgccgacacggaggtcaagtttaagggtactttggtgcacgaagctcaactcaactatttctacatctctcctggaggttccaactatgggagcccacgccccgcccatgccaacatgaatgccaatgcggccgcgggactggcccctgagcacatccccaccccgggggccgccctgtcctggcaggcggccatcgacgcagcccggcaggcgaagctgatgggcagcgctggcaacgcgaccatctccacagtcagctccacgcagcggaagcggcagcaatatgggaaacccaagaagcagggcagcaccacggccacacgcccgccccgagccctgctctgcctgaccctgaagaaccccatccggagggcctgcatcagcattgtcgaatggaaaccatttgaaataattattttactgactatttttgccaattgtgtggccttagcgatctatattccctttccagaagatgattccaacgccactaattccaacctggaacgagtggaatatctctttctcataatttttacggtggaagcatttttaaaagtcatcgcctatggactcctctttcaccccaatgcctacctccgcaacggctggaatctgctcgattttatcattgtggtcgtggggctttttagcgcaattttagaacaagcaaccaaagcagacggggcgaacgctctcggagggaaaggggccggatttgatgtgaaagcgctgagggccttccgcgtgctgcgccccctgcggctggtgtctggagtcccaagtctccaggtggtcctgaattccatcatcaaggccatggtccccctgctgcacatcgccctgctcgtgctgtttgtcatcatcatctatgccatcatcggcctggagctcttcatggggaagatgcacaagacctgctacaaccaggagggcatagcagatgttccagcagaagatgacccttccccttgtgcgctggaaacaggccatgggcggcagtgccagaacggcacggtgtgcaagcccggctgggatggtcccaagcacggcatcaccaactttgacaactttgccttcgccatgctcacggtgttccagtgcatcaccatggagggctggacggacgtgctgtactggatgcaggacgctatgggctatgagttaccctgggtgtattttgtcagtctggtcatctttggatcctttttcgttctaaatctggttctcggtgtgttgagcggagagttttccaaagagagggagaaggccaaggcccggggagatttccagaagctgcgggagaagcagcagctggaagaggatctcaaaggctacctggactggatcactcaggccgaagacatcgatcccgagaacgaggacgaaggcatggatgaggagaagccccgaaacatgagcatgcccaccagtgagactgagtccgtcaacaccgaaaacgtggctggaggtgacatcgagggagaaaactgcggggccaggctggcccaccggatctccaagtcaaagttcagccgctactggcgccggtggaatcggttctgcagaagaaagtgccgtgccgcggtcaagtctaatgtcttctactggctggtgattttcctggtgttcctcaacacgctcaccattgcctctgagcactacaaccagccccactggctcacggaagtccaagacacggcgaacaaggccctgctggcgctgttcacggcagagatgctgctgaagatgtacagcctgggcctgcaggcctacttcgtgtccctcttcaaccgctttgactgcttcgtcgtgtgtggcggcatcctggagaccatcctggtagagaccaagatcatgtccccactgggcatctccgtgctccgatgcgtccggttgctgaggatattcaagatcacgaggtactggaactccttgagcaacctggtggcatccttgctgaactctgtgcgctccatcgcctccctgctccttctcctattcctcttcatcatcatcttctccctcctggggatgcagctctttggaggaaagttcaactttgatgagatgcagacccggaggagcacatttgataacttcccccagtccctcctcactgtgtttcagatcctgaccggggaggactggaattcggtgatgtatgatgggatcatggcttatggcggcccctcttttccagggatgttagtctgtatttacttcatcatcctcttcatctgtggaaactatatcctactgaatgtgttcttggccattgctgtggacaacctggctgacgctgagagcctcacatctgcccaaaaggaggaggaagaggagaaggagagaaagaagctggccaggactgccagcccagagaagaaacaagagatggtggagaagccggcagtggaggaatccaaggaggagaagattgagctgaaatccatcacagctgacggagagtctccacccaccaccaagatcaacatggatgacctccagcccaatgaaaatgaggataagagcccctaccccaacccagagactacaggagaagaggatgaggaggagccagagatgcctgtcggccctcgcccacgcccactctctgagcttcaccttaaggaaaaggcagtgcccatgccagaagccagtgcgtttttcgtcttcagctctaacaacaggtttcgcctgcagtgccaccgcattgtcaacgacacgatcttcaccaacctgatcctcttcttcattctgctcagcagcatttccctggctgctgaggacccggtccagcacacctccttcaggaaccacattctgttttattttgatattgtttttaccaccattttcaccattgaaattgctctgaagatgactgcttatggggcttttctgcacaagggctccttctgccggaactacttcaacatcctggacctgctggtggtcagcgtgtccctcatctcctttggcatccagtccagtgcaatcaatgtcgtgaagatcttgcgagtcctgcgagtactcaggcccctgagggctatcaacagggccaaggggctaaagcatgtggttcagtgtgtgtttgtcgccatccggaccatcgggaacatcgtgattgtcaccaccctgctgcagttcatgttcgcctgcatcggggtccagctcttcaagggaaagctgtacacctgttcagacagttccaagcagacagaggcggaatgcaagggcaactacatcacgtacaaagacggggaggttgaccaccccatcatccaaccccgtagctgggagaacagcaagtttgactttgacaatgttctggccgccatgatggccctcttcaccgtctccaccttcgaagggtggccagagctgctgtaccgctccatcgactcccacaccgaagacaagggtcccatctacaattaccgcgtggagatctccatcttcttcatcatctacatcatcatcatcgccttcttcatgatgaacatcttcgtgggcttcgtcatcgtcaccttccaggagcagggggagcaggagtacaagaactgtgagctggacaagaaccagcgacagtgtgtggaatacgccctcaaggcccggcccctgcggaggtatatccccaagaaccagcaccagtacaaagtgtggtacgtggtcaactccacctacttcgagtacctgatgttcgtcctcatcctgctcaacaccatctgcctggccatgcagcactacggccagagctgcctgttcaaaatcgccatgaacatcctcaacatgctcttcactggcctcttcaccgtggagatgatcctgaagctcattgccttcaaacccaagggttactttagtgatccctggaatgtttttgacttcctcatcgtaattggcagcataattgacgtcattctcagtgagactaatcactatttctgtgatgcatggaatacatttgacgccttgattgttgtgggtagcattgttgatatagcaatcaccgaggtaaacccagctgaacatacccaatgctctccctctatgaacgcagaggaaaactcgcgcatctccatcaccttcttccgcctattccgggtcatgcgcctggtgaagctgctgagccgcggggagggcatccggacgctgctgtggaccttcatcaagtccttccaggccctgccctatgtggccctcctgatcgtgatgctgttcttcatctacgcggtgatcgggatgcaggtgtttgggaaaattgccctgaatgataccacagagatcaaccggaacaacaactttcagaccttcccccaggccgtgctgctcctcttcaggtgtgccaccggggaggcctggcaggacatcatgctggcctgcatgccaggcaagaagtgtgccccggagtccgagcccggcaacagcacggagggtgagacaccctgtggcagcagctttgccgtcttctacttcatcagcttctacatgctctgtgccttcctgatcatcaacctctttgtagctgtcatcatggacaactttgactacctgacaagggactggtccatccttggtccccaccacctggatgagtttaaaagaatctgggcagagtatgaccctgaagccaagggtcgtatcaaacacctggatgtggtgaccctcctccggcggattcagcccccactaggttttgggaagctgtgccctcaccgagtggcttgcaaacgcctggtctccatgaacatgcctctgaacagcgacgggacggtcatgttcaatgccaccctgtttgccctggtcaggacagctctgaggatcaaaacagaagagggacccagcccatcagaggcccaccaaggggctgaggatcctttccgccctgcagggaacctcgaacaggccaatgaggagctgcgggccatcatcaagaagatctggaagcggaccagcatgaagctgctggaccaggtggtgcctcctgcaggcgatgatgaggtcaccgttggcaagttctacgccacattcctgatccaggagtacttccggaaattcaagaagcgcaaagagcagggtcttgtgggcaaaccctcccagaggaacgcgctgtctctgcaggctggcttgcgcacgctgcacgacatcgggcctgagatccgacgggccatctccggagacctcaccgctgaggaggagctggacaaggccatgaaggaggctgtgtccgctgcttctgaagatgacatcttcaggagggccggtggcctgtttggcaaccacgtcagctactaccaaagcgacggccggagcgccttcccccagaccttcaccactcagcgcccgctgcacatcaacaaggcgggcagcagccagggcgacactgagtcgccgtcccacgagaagctggtggactccaccttcacccccagcagctactcgtccaccggctccaatgccaacatcaacaatgccaacaacaccgccctgggtcgcctccctcgccctgccggctaccccagcacggtcagcactgtggagggccatgggccccccttgtcccctgccatccgggtgcaggaggtggcgtggaagctcagctccaaaaggtgccactccggggagagccagacagccatggtgggtccggaggagacgtctcaggatgagacctatgaagtgaagatgaaccatgacgcggaggcctgcagtgagcccagcctgctctccacagacatgctgtcctaccaggatgacgaaaatcggcaactgacgctcccagaggaggacaagagggacatgcggcaatccccaaagaggggtttcctccgctccgcctcactaggtcgaagggcctccttccacctggaatgtctgaagcgacagaaggaccgagggggagacatctctcagaagacagtcctgcccttgcatctggttcatcatcaggcattggcagtggcaggcctgagccccctcctccagagaagccattcccctgcctcattccccaggccttttgccacccccccggccacacctggcagccgaggctggccgccacagcccatccccaccctgcggctggagggcgccgagtccagtgagaaactcaacagcagcttcccgtccatccactgcggctcctgggctgagaccacccccggtggcggggacagcaacaccacccggagagcccggcccgtctccctcatggtgcccagccaggctggggccccggggaggcagttccacggcagtgccagcagcctggtggaagcggtcttgatttctgaaggactggggcagttcgctcaagatcccaagttcatcgaggtcaccacccaggagctggcggacgcctgcgacatgaccatagaggagatggagagcgcggccgacaacatcctcagcgggggcgccccgcagagccccaatggcgccctcttaccctttgtgaactgcagggacgcggggcaggaccgagccgggggcgaagaggacgcgggctgtgcgcgcgcgcgggggcgcctgagcgaggaggagctccaggacagcagggtctacgtcagcagcctgtagtgggcgctgccagatgcgggctttttttatttgtttcaatgttcctaatgggttcgtttcagaagtgcctcactgttctcgtgacctggagttaaccggaacagcgtcttcattcatttctgttgggacaagacgcggagcctgggtgcgcgagccgccctccgggaggaaggcgcccggctgcgtctgcagaggcggggagaggaggcggcgaaggtcccggggcgcgaggaaggcgcctgccctctcccagcccgcaggccccgggcccagccacgcctctgcggggagagcaccccggcttcccgcgcgccctcacccaaaggaccctacagcaaacgggtgtctttcgactctgcttgtagaaaccatttgcacatattctgtacgagcctcgctgtctccctagagccagggtcccgcggatttggagaagggagcggggcaggacttccaggaggaccccagcccggcccggagagggaggcggcggccgtcaggggcgcggagctttggggatgggcgtcgggccggccatggtgccgctcaccccgacccgcccctgcccacctgcgacgggatcccccgaccggcacgggccacgccgagctcccggccagccgccggcccgcaggcagcgcaagggaggagctgcgccgccgggaaggggccgccggctccgcgcaaccaggtggtgctgagcttccgctgagcgctcttttgttttgtggtttgacacttttcttgacagcatgttgcagtttctttttggttttgggttttttttattttttattttgttttcccagggggaggggaggaagaagagtgtttacaaagtcctgtagccccctcacctttctgttttcacttttgccaatgtacatccggtttggttttcttgtattatttaaacggttgtggtttcctttttccacggaggttcaatagaagccgctgcaggagagttttaccaaccattgtgtatgcccaataatttgttatcatttccttaggtagcaacctatttttgttctggtttggttcggttttctcatggaaaggtaattgcaatgcacttgatgtggtcttgcacatgtgggtgatagagttgggttccttttaatgctgggtgtacaggtgggtttgggagagaggagcatgcgcgagagtctccgagtgtgtgcgacgcgtgtgtgtgtggtgggttgtctgtgtgcatatgtcctgcctatgtatatgcacccacaccatgtgcccgtgcacaccagtgactacgcagtcccccctttctggtttagctgtgagaagatctgaatctggggccatttgaaagcaaaaacaaaccactgtctctgcttctgaaatgggaatcagtaactctttgcattttctgtcccacaagatatgcaaaaacaatgcaataatattcatttaaaaatacaattgtgagttgtgttggcattaaaactgtattttaaaaaaaagacacagaaatttaagggaaaaacacaagaaggcattttgcttcactatattccgtgtaatgttttattgcattgataatgtttctgttgaagaaaccgttatacttgaattcaggtcagtttcagtatttttcaaatatttttttaaaactgaattgcaattgtgccaagcgaatataatgaattgaattaagttggttttcggattcacttcttgtatattttgctgcatgtaaagtaaatcattttgtatttggagtgtgacaagctttacctttgaactcttaagtgcttttctatatgtggttgggggaagggaacaagttttctctaatttgcacaatgagcaaaggtatcaccagtgtagtcattattctgctctccacaaacaggtttggacattactgttttgcatatcttgtgttcgcttccgtttgcctcaatttttccaaaatcatttgctgggtatgttcgtaccgcctcttgctgtgatagaccaggacctattttattccaggcttcactgtccactctgctctggtcatctgatttggtacttctccaagaacagcccttcactgttaggcgtagggaggcgttctgaccagccctcagtcaccgggctggcatccgcatcccccacggaagaggtggctggctttgccttcgctcccaccacacagacttttctcgttggcttccttaggaaagtgtacaccaaccgggaggataaaattaaagtcaggctgcttggagggagggcatcctcacttcaggattccgctctacccagcgagggcagcaggggctcgagaaaggaacgggtgaaaccctgatccatctgaaagtcaactctgcgtgctcctttctccatcccttcctcactctggagcagcctttccttcgggcttgccctaatgtttgggctgctgaggaggaggccaggacagaggaagaggcatccggagatcacagtgggggtgggaacagattttgtaggggcatctctgatgctcacgtatctccctagaacatcactcttttggtgctgtgtccttcaaatgtgtatcaacagtgatggctgaaaagggactgctttggggaaaactggacccaaccattcccccagaactgacccattgaatctctttcagtcctagtgttccctcagcccctcttggcacatatataagtaagctagaaattaaaaaaagggacagtccattcctctatgacagcttgctggactgattcatgaaaaagtggagaaatgtacttgatactccctggttaacacagtctagaaacagagtttctttatgggtatccacaccgaagtcatccggactttcgtgattccttttcagtgccaccaaggtcctctagaaattgagtttaggtatcatcctttataaagttccgaagatttctacccggaggtacacacgggcgttccctgtctaggacgggaggactgtccgagactgatcttccgatctagaataagactggtgtacgatgcctgtcatcagaacagactggcacaagtagtgacaccaatgaaccgcatccacagttttccgagtgatgtctactctccacctaaaatggaattttccccatgaccttataaaacataattgtcacatcttccatacccctcctgacagcccccaagtggcaggagaaaacagccaggggctaagggcccaagggacttgaagaaacagtttaaggtctgcagtttggtcagcttaattctttgtcctctgaccagccctgcctctttcatttccagaccttagagaatttttcccagctttgattcagaaggtattattataacccctttcctccttcttaatccagtaggtctcactctgggaaatccactcaaaagagcaaggcaatgactctcattctgtttcccagttccaaattccaggtgcttgtctggagtgaagctgcctgtttttttttctcccagcttttctccacccagcatgtctcctgactgtgcagctgaagacacggggggcaacctcaggaaacgcagccctttccatgcccaagttcatctcctgagaaatagggacaccttgaaaatgaggactttggaagtcacccaaaggatggtggctactttatggagtcctgaagatacacagccaccactcctaaaggcaaagaagtagaacaaggatgtaggtcagggatagagtggaaccctggtcatcagggtttttagcctcatcgtgggagaggtggcaaaggaggatgacggcctctccgtccctagaggcctagaataattgaaatatcattgttgaggatttagaaacaattcaacaaagaggccacaacaggggctgctgactcccagaagacctctttaaaccccaggggcggcaaatacttgctgatgcagtccgggccaattccatgttttaatgaagacctgcctctggggcaaatgtcagcacagggaggactgggaggagaatggaggcaagaaaagggcatagtttgactccctctgggtctcttcccagttcatggaaggacgtattcagctcacccacccacagtgatccgtgtggtggagccgctgacatctcaaggatttgggaaggtgagaagagcacacgttccatctgggggtgttgtcccagccatgtcagcctacctggcggggtgtgagggtgtctgccgccctgacccccctctgctgatgtccctcccctcacgtggtccaggtgccacctgacacaggctcctgtgcaaagacaggcagggaagcccgcatctcactcacagggaggccctcagctgccagagtccaggttctccagcggctacgatttgaggaggttgagggggaagataggaggcagagaagagtcctacaactgtcaggaatggggcacctttccctgtccctaagcagagcttcctcttcccactgccctccccggccccagctctctgtctttcccaacacctagtgagaaagacggtgcgtggaagggagtcccatgggcagatgcttacacaacctctttgtgaagccacttctgggcttaacttcattcatcaatttatttttacgtcaaagcaatgaaacacttctttgtggagccagataccagtataacaggtgaatgggtttctgccacatctccacattactgggggggatgcttgaaccacctccctaggacacacacctttaaggcacaagggctggggttgagctctagataagggactttcctgctcctgcaagggtgagcactgtatacacagacaaggagggcgcagcagagtggctccctcgggtggaagtagtaccatcagaagctcctgttattatgagatacattctatttatgtacattgagagaatactacaatcaacacttttacctgggatgactttaagaggtttgagccaaagtacctgaagtggcaaagatccgtggtctttgtggggtattagagaagcgttccaggcactctggatcttgcagctgagtggatgaagggtaaacacatctgcggagcaccgagaggagtcagagttagcatttttcatgaaaattctcccacatctctactaagaatgaggaggaaaagatgaagactaagtaattacactgaggtttgaaatgttacgtcaccagagccaagtcctctcccttcagataggttactggctgctacacagggacacccccaccttttcagggcatcccatgcaccccaattctcagaatctaaggaatttgactttgtagggatcccagaaagggcaccgtgccacttcccctggtgtgaatcagacatacattgtacattcatttctaaaattcactcatgcacctcaaaccaaggttattatcaaaaagctctgggtggaagagcttgtaggttttttaagagtgggtcatttctatgtgaggaaatgcagaaatggacagaatgattcttattcactgtttgggtctggagaattcccgttatggaattcttagagatctcaagtttattaccaagggaattaggaaaaagaagtgagcaggcaccaggccaagcagtgactcccttgccaaggaacctgaggctgcaggattcagggacctccttgaggaaacctctcctggccactggccaggagaaaagagaaggttctcctatagagtgaaaagaagcaaaagagagtgggtcactgggtcctgtacatagcacccaaccccaagacttcccaacatggagaaactataccaatgtttaaaagggggaaaggaaagaacttgcacatcaagggaagacgatttgtaaacacacagtcctgtgcaaaaagatctccttcaggaggtgtctccagcatcccaaagctgtgcgcacctcctcttttcctgctcaggccacctatgcatccagctgcagcccatccccacacctgaaatccatctcttgaatcccagccagattatataccaccccatttccatgtcctgtcctgcccagaatgcatgctgttctcccagagcctgatgggaatgaggccttgcaatgaggccatgggaaacagagatgagcatgtctggacaagtctgtgatggtagtggatgagaataacccatggcaaaacacacacgctcattaagaaatagggtgacagattccccactggtgaagcactgaaaggtctattactctcataacattgctgtttcattttaatccaccagagctaccatgcaaaactttcctccagtgaaaggctccagataaagctcccctctcctcgtgtcctcctgctcagacccaccttcatccgccaaaccaatctgtatcatgcctgttatcagagaggcacagaaagatgggcactgcctccattgtcactgttccccacacccctacacacccccacatcctcccctccaggctccacgacttcacagtcttactgttgtaaatatcattgtacagtttgtaatcctcaaataatcccattgtcagaggcctcgcctgatggccttctcaccctcgagaaaggccagggaacctggaaggggcaacccttcaaggagagcttcagggtcatctctgtgtgagacactattgtatattcctgtaagattgcatttttatctaaggaatgatgttatttaaaaaacaaacaaaaaacacaaaaaataagaattgcaaataaatttcttaacaatgtcta

SEQ ID NO: 18 - RNA, 13649 nt, Macaca mulatta
  source 1..13649: mol_type = mRNA
tagacattgttaagaaatttatttgcaattcttattttttgtgttttttgtttgttttttaaataacatcattccttagataaaaatgcaatcttacaggaatatacaatagtgtctcacacagagatgaccctgaagctctccttgaagggttgccccttccaggttccctggcctttctcgagggtgagaaggccatcaggcgaggcctctgacaatgggattatttgaggattacaaactgtacaatgatatttacaacagtaagactgtgaagtcgtggagcctggaggggaggatgtgggggtgtgtaggggtgtggggaacagtgacaatggaggcagtgcccatctttctgtgcctctctgataacaggcatgatacagattggtttggcggatgaaggtgggtctgagcaggaggacacgaggagaggggagctttatctggagcctttcactggaggaaagttttgcatggtagctctggtggattaaaatgaaacagcaatgttatgagagtaatagacctttcagtgcttcaccagtggggaatctgtcaccctatttcttaatgagcgtgtgtgttttgccatgggttattctcatccactaccatcacagacttgtccagacatgctcatctctgtttcccatggcctcattgcaaggcctcattcccatcaggctctgggagaacagcatgcattctgggcaggacaggacatggaaatggggtggtatataatctggctgggattcaagagatggatttcaggtgtggggatgggctgcagctggatgcataggtggcctgagcaggaaaagaggaggtgcgcacagctttgggatgctggagacacctcctgaaggagatctttttgcacaggactgtgtgtttacaaatcgtcttcccttgatgtgcaagttctttcctttcccccttttaaacattggtatagtttctccatgttgggaagtcttggggttgggtgctatgtacaggacccagtgacccactctcttttgcttcttttcactctataggagaaccttctcttttctcctggccagtggccaggagaggtttcctcaaggaggtccctgaatcctgcagcctcaggttccttggcaagggagtcactgcttggcctggtgcctgctcacttctttttcctaattcccttggtaataaacttgagatctctaagaattccataacgggaattctccagacccaaacagtgaataagaatcattctgtccatttctgcatttcctcacatagaaatgacccactcttaaaaaacctacaagctcttccacccagagctttttgataataaccttggtttgaggtgcatgagtgaattttagaaatgaatgtacaatgtatgtctgattcacaccaggggaagtggcacggtgccctttctgggatccctacaaagtcaaattccttagattctgagaattggggtgcatgggatgccctgaaaaggtgggggtgtccctgtgtagcagccagtaacctatctgaagggagaggacttggctctggtgacgtaacatttcaaacctcagtgtaattacttagtcttcatcttttcctcctcattcttagtagagatgtgggagaattttcatgaaaaatgctaactctgactcctctcggtgctccgcagatgtgtttacccttcatccactcagctgcaagatccagagtgcctggaacgcttctctaataccccacaaagaccacggatctttgccacttcaggtactttggctcaaacctcttaaagtcatcccaggtaaaagtgttgattgtagtattctctcaatgtacataaatagaatgtatctcataataacaggagcttctgatggtactacttccacccgagggagccactctgctgcgccctccttgtctgtgtatacagtgctcacccttgcaggagcaggaaagtcccttatctagagctcaaccccagcccttgtgccttaaaggtgtgtgtcctagggaggtggttcaagcatcccccccagtaatgtggagatgtggcagaaacccattcacctgttatactggtatctggctccacaaagaagtgtttcattgctttgacgtaaaaataaattgatgaatgaagttaagcccagaagtggcttcacaaagaggttgtgtaagcatctgcccatgggactcccttccacgcaccgtctttctcactaggtgttgggaaagacagagagctggggccggggagggcagtgggaagaggaagctctgcttagggacagggaaaggtgccccattcctgacagttgtaggactcttctctgcctcctatcttccccctcaacctcctcaaatcgtagccgctggagaacctggactctggcagctgagggcctccctgtgagtgagatgcgggcttccctgcctgtctttgcacaggagcctgtgtcaggtggcacctggaccacgtgaggggagggacatcagcagaggggggtcagggcggcagacaccctcacaccccgccaggtaggctgacatggctgggacaacacccccagatggaacgtgtgctcttctcaccttcccaaatccttgagatgtcagcggctccaccacacggatcactgtgggtgggtgagctgaatacgtccttccatgaactgggaagagacccagagggagtcaaactatgcccttttcttgcctccattctcctcccagtcctccctgtgctgacatttgccccagaggcaggtcttcattaaaacatggaattggcccggactgcatcagcaagtatttgccgcccctggggtttaaagaggtcttctgggagtcagcagcccctgttgtggcctctttgttgaattgtttctaaatcctcaacaatgatatttcaattattctaggcctctagggacggagaggccgtcatcctcctttgccacctctcccacgatgaggctaaaaaccctgatgaccagggttccactctatccctgacctacatccttgttctacttctttgcctttaggagtggtggctgtgtatcttcaggactccataaagtagccaccatcctttgggtgacttccaaagtcctcattttcaaggtgtccctatttctcaggagatgaacttgggcatggaaagggctgcgtttcctgaggttgccccccgtgtcttcagctgcacagtcaggagacatgctgggtggagaaaagctgggagaaaaaaaaacaggcagcttcactccagacaagcacctggaatttggaactgggaaacagaatgagagtcattgccttgctcttttgagtggatttcccagagtgagacctactggattaagaaggaggaaaggggttataataataccttctgaatcaaagctgggaaaaattctctaaggtctggaaatgaaagaggcagggctggtcagaggacaaagaattaagctgaccaaactgcagaccttaaactgtttcttcaagtcccttgggcccttagcccctggctgttttctcctgccacttgggggctgtcaggaggggtatggaagatgtgacaattatgttttataaggtcatggggaaaattccattttaggtggagagtagacatcactcggaaaactgtggatgcggttcattggtgtcactacttgtgccagtctgttctgatgacaggcatcgtacaccagtcttattctagatcggaagatcagtctcggacagtcctcccgtcctagacagggaacgcccgtgtgtacctccgggtagaaatcttcggaactttataaaggatgatacctaaactcaatttctagaggaccttggtggcactgaaaaggaatcacgaaagtccggatgacttcggtgtggatacccataaagaaactctgtttctagactgtgttaaccagggagtatcaagtacatttctccactttttcatgaatcagtccagcaagctgtcatagaggaatggactgtccctttttttaatttctagcttacttatatatgtgccaagaggggctgagggaacactaggactgaaagagattcaatgggtcagttctgggggaatggttgggtccagttttccccaaagcagtcccttttcagccatcactgttgatacacatttgaaggacacagcaccaaaagagtgatgttctagggagatacgtgagcatcagagatgcccctacaaaatctgttcccacccccactgtgatctccggatgcctcttcctctgtcctggcctcctcctcagcagcccaaacattagggcaagcccgaaggaaaggctgctccagagtgaggaagggatggagaaaggagcacgcagagttgactttcagatggatcagggtttcacccgttcctttctcgagcccctgctgccctcgctgggtagagcggaatcctgaagtgaggatgccctccctccaagcagcctgactttaattttatcctcccggttggtgtacactttcctaaggaagccaacgagaaaagtctgtgtggtgggagcgaaggcaaagccagccacctcttccgtgggggatgcggatgccagcccggtgactgagggctggtcagaacgcctccctacgcctaacagtgaagggctgttcttggagaagtaccaaatcagatgaccagagcagagtggacagtgaagcctggaataaaataggtcctggtctatcacagcaagaggcggtacgaacatacccagcaaatgattttggaaaaattgaggcaaacggaagcgaacacaagatatgcaaaacagtaatgtccaaacctgtttgtggagagcagaataatgactacactggtgatacctttgctcattgtgcaaattagagaaaacttgttcccttcccccaaccacatatagaaaagcacttaagagttcaaaggtaaagcttgtcacactccaaatacaaaatgatttactttacatgcagcaaaatatacaagaagtgaatccgaaaaccaacttaattcaattcattatattcgcttggcacaattgcaattcagttttaaaaaaatatttgaaaaatactgaaactgacctgaattcaagtataacggtttcttcaacagaaacattatcaatgcaataaaacattacacggaatatagtgaagcaaaatgccttcttgtgtttttcccttaaatttctgtgtcttttttttaaaatacagttttaatgccaacacaactcacaattgtatttttaaatgaatattattgcattgtttttgcatatcttgtgggacagaaaatgcaaagagttactgattcccatttcagaagcagagacagtggtttgtttttgctttcaaatggccccagattcagatcttctcacagctaaaccagaaaggggggactgcgtagtcactggtgtgcacgggcacatggtgtgggtgcatatacataggcaggacatatgcacacagacaacccaccacacacacacgcgtcgcacacactcggagactctcgcgcatgctcctctctcccaaacccacctgtacacccagcattaaaaggaacccaactctatcacccacatgtgcaagaccacatcaagtgcattgcaattacctttccatgagaaaaccgaaccaaaccagaacaaaaataggttgctacctaaggaaatgataacaaattattgggcatacacaatggttggtaaaactctcctgcagcggcttctattgaacctccgtggaaaaaggaaaccacaaccgtttaaataatacaagaaaaccaaaccggatgtacattggcaaaagtgaaaacagaaaggtgagggggctacaggactttgtaaacactcttcttcctcccctccccctgggaaaacaaaataaaaaataaaaaaaacccaaaaccaaaaagaaactgcaacatgctgtcaagaaaagtgtcaaaccacaaaacaaaagagcgctcagcggaagctcagcaccacctggttgcgcggagccggcggccccttcccggcggcgcagctcctcccttgcgctgcctgcgggccggcggctggccgggagctcggcgtggcccgtgccggtcgggggatcccgtcgcaggtgggcaggggcgggtcggggtgagcggcaccatggccggcccgacgcccatccccaaagctccgcgcccctgacggccgccgcctccctctccgggccgggctggggtcctcctggaagtcctgccccgctcccttctccaaatccgcgggaccctggctctagggagacagcgaggctcgtacagaatatgtgcaaatggtttctacaagcagagtcgaaagacacccgtttgctgtagggtcctttgggtgagggcgcgcgggaagccggggtgctctccccgcagaggcgtggctgggcccggggcctgcgggctgggagagggcaggcgccttcctcgcgccccgggaccttcgccgcctcctctccccgcctctgcagacgcagccgggcgccttcctcccggagggcggctcgcgcacccaggctccgcgtcttgtcccaacagaaatgaatgaagacgctgttccggttaactccaggtcacgagaacagtgaggcacttctgaaacgaacccattaggaacattgaaacaaataaaaaaagcccgcatctggcagcgcccactacaggctgctgacgtagaccctgctgtcctggagctcctcctcgctcaggcgcccccgcgcgcgcgcacagcccgcgtcctcttcgcccccggctcggtcctgccccgcgtccctgcagttcacaaagggtaagagggcgccattggggctctgcggggcgcccccgctgaggatgttgtcggccgcgctctccatctcctctatggtcatgtcgcaggcgtccgccagctcctgggtggtgacctcgatgaacttgggatcttgagcgaactgccccagtccttcagaaatcaagaccgcttccaccaggctgctggcactgccgtggaactgcctccccggggccccagcctggctgggcaccatgagggagacgggccgggctctccgggtggtgttgctgtccccgccaccgggggtggtctcagcccaggagccgcagtggatggacgggaagctgctgttgagtttctcactggactcggcgccctccagccgcagggtggggatgggctgtggcggccagcctcggctgccaggtgtggccgggggggtggcaaaaggcctggggaatgaggcaggggaatggcttctctggaggagggggctcaggcctgccactgccaatgcctgatgatgaaccagatgcaagggcaggactgtcttctgagagatgtctccccctcggtccttctgtcgcttcagacattccaggtggaaggaggcccttcgacctagtgaggcggagcggaggaaacccctctttggggattgccgcatgtccctcttgtcctcctctgggagcgtcagttgccgattttcgtcatcctggtaggacagcatgtctgtggagagcaggctgggctcactgcaggcctccgcgtcatggttcatcttcacttcataggtctcatcctgagacgtctcctccggacccaccatggctgtctggctctccccggagtggcaccttttggagctgagcttccacgccacctcctgcacccggatggcaggggacaaggggggcccatggccctccacagtgctgaccgtgctggggtagccggcagggcgagggaggcgacccagggcggtgttgttggcattgttgatgttggcattggagccggtggacgagtagctgctgggggtgaaggtggagtccaccagcttctcgtgggacggcgactcagtgtcgccctggctgctgcccgccttgttgatgtgcagcgggcgctgagtggtgaaggtctgggggaaggcgctccggccgtcgctttggtagtagctgacgtggttgccaaacaggccaccggccctcctgaagatgtcatcttcagaagcagcggacacagcctccttcatggccttgtccagctcctcctcagcggtgaggtctccggagatggcccgtcggatctcaggcccgatgtcgtgcagcgtgcgcaagccagcctgcagagacagcgcgttcctctgggagggtttgcccacaagaccctgctctttgcgcttcttgaatttccggaagtactcctggatcaggaatgtggcgtagaacttgccaacggtgacctcatcatcgcctgcaggaggcaccacctggtccagcagcttcatgctggtccgcttccagatcttcttgatgatggcccgcagctcctcattggcctgttcgaggttccctgcagggcggaaaggatcctcagccccttggtgggcctctgatgggctgggtccctcttctgttttgatcctcagagctgtcctgaccagggcaaacagggtggcattgaacatgaccgtcccgtcgctgttcagaggcatgttcatggagaccaggcgtttgcaagccactcggtgagggcacagcttcccaaaacctagtgggggctgaatccgccggaggagggtcaccacatccaggtgtttgatacgacccttggcttcagggtcatactctgcccagattcttttaaactcatccaggtggtggggaccaaggatggaccagtcccttgtcaggtagtcaaagttgtccatgatgacagctacaaagaggttgatgatcaggaaggcacagagcatgtagaagctgatgaagtagaagacggcaaagctgctgccacagggtgtctcaccctccgtgctgttgccgggctcggactccggggcacacttcttgcctggcatgcaggccagcatgatgtcctgccaggcctccccggtggcacacctgaagaggagcagcacggcctgggggaaggtctgaaagttgttgttccggttgatctctgtggtatcattcagggcaattttcccaaacacctgcatcccgatcaccgcgtagatgaagaacagcatcacgatcaggagggccacatagggcagggcctggaaggacttgatgaaggtccacagcagcgtccggatgccctccccgcggctcagcagcttcaccaggcgcatgacccggaataggcggaagaaggtgatggagatgcgcgagttttcctctgcgttcatagagggagagcattgggtatgttcagctgggtttacctcggtgattgctatatcaacaatgctacccacaacaatcaaggcgtcaaatgtattccatgcatcacagaaatagtgattagtctcactgagaatgacgtcaattatgctgccaattacgatgaggaagtcaaaaacattccagggatcactaaagtaacccttgggtttgaaggcaatgagcttcaggatcatctccacggtgaagaggccagtgaagagcatgttgaggatgttcatggcgattttgaacaggcagctctggccgtagtgctgcatggccaggcagatggtgttgagcaggatgaggacgaacatcaggtactcgaagtaggtggagttgaccacgtaccacactttgtactggtgctggttcttggggatatacctccgcaggggccgggccttgagggcgtattccacacactgtcgctggttcttgtccagctcacagttcttgtactcctgctccccctgctcctggaaggtgacgatgacgaagcccacgaagatgttcatcatgaagaaggcgatgatgatgatgtagatgatgaagaagatggagatctccacgcggtaattgtagatgggacccttgtcttcggtgtgggagtcgatggagcggtacagcagctctggccacccttcgaaggtggagacggtgaagagggccatcatggcggccagaacattgtcaaagtcaaacttgctgttctcccagctacggggttggatgatggggtggtcaacctccccgtctttgtacgtgatgtagttgcccttgcattccgcctctgtctgcttggaactgtctgaacaggtgtacagctttcccttgaagagctggaccccgatgcaggcgaacatgaactgcagcagggtggtgacaatcacgatgttcccgatggtccggatggcgacaaacacacactgaaccacatgctttagccccttggccctgttgatagccctcaggggcctgagtactcgcaggactcgcaagatcttcacgacattgattgcactggactggatgccaaaggagatgagggacacgctgaccaccagcaggtccaggatgttgaagtagttccggcagaaggagcccttgtgcagaaaagccccataagcagtcatcttcagagcaatttcaatggtgaaaatggtggtaaaaacaatatcaaaataaaacagaatgtggttcctgaaggaggtgtgctggaccgggtcctcagcagccagggaaatgctgctgagcagaatgaagaagaggatcaggttggtgaagatcgtgtcgttgacaatgcggtggcactgcaggcgaaacctgttgttagagctgaagacgaaaaacgcactggcttctggcatgggcactgccttttccttaaggtgaagctcagagagtgggcgtgggcgagggccgacaggcatctctggctcctcctcatcctcttctcctgtagtctctgggttggggtaggggctcttatcctcattttcattgggctggaggtcatccatgttgatcttggtggtgggtggagactctccgtcagctgtgatggatttcagctcaatcttctcctccttggattcctccactgccggcttctccaccatctcttgtttcttctctgggctggcagtcctggccagcttctttctctccttctcctcttcctcctccttttgggcagatgtgaggctctcagcgtcagccaggttgtccacagcaatggccaagaacacattcagtaggatatagtttccacagatgaagaggatgatgaagtaaatacagactaacatccctggaaaagaggggccgccataagccatgatcccatcatacatcaccgaattccagtcctccccggtcaggatctgaaacacagtgaggagggactgggggaagttatcaaatgtgctcctccgggtctgcatctcatcaaagttgaactttcctccaaagagctgcatccccaggagggagaagatgatgatgaagaggaataggagaaggagcagggaggcgatggagcgcacagagttcagcaaggatgccaccaggttgctcaaggagttccagtacctcgtgatcttgaatatcctcagcaaccggacgcatcggagcacggagatgcccagtggggacatgatcttggtctctaccaggatggtctccaggatgccgccacacacgacgaagcagtcaaagcggttgaagagggacacgaagtaggcctgcaggcccaggctgtacatcttcagcagcatctctgccgtgaacagcgccagcagggccttgttcgccgtgtcttggacttccgtgagccagtggggctggttgtagtgctcagaggcaatggtgagcgtgttgaggaacaccaggaaaatcaccagccagtagaagacattagacttgaccgcggcacggcactttcttctgcagaaccgattccaccggcgccagtagcggctgaactttgacttggagatccggtgggccagcctggccccgcagttttctccctcgatgtcacctccagccacgttttcggtgttgacggactcagtctcactggtgggcatgctcatgtttcggggcttctcctcatccatgccttcgtcctcgttctcgggatcgatgtcttcggcctgagtgatccagtccaggtagcctttgagatcctcttccagctgctgcttctcccgcagcttctggaaatctccccgggccttggccttctccctctctttggaaaactctccgctcaacacaccgagaaccagatttagaacgaaaaaggatccaaagatgaccagactgacaaaatacacccagggtaactcatagcccatagcgtcctgcatccagtacagcacgtccgtccagccctccatggtgatgcactggaacaccgtgagcatggcgaaggcaaagttgtcaaagttggtgatgccgtgcttgggaccatcccagccgggcttgcacaccgtgccgttctggcactgccgcccatggcctgtttccagcgcacaaggggaagggtcatcttctgctggaacatctgctatgccctcctggttgtagcaggtcttgtgcatcttccccatgaagagctccaggccgatgatggcatagatgatgatgacaaacagcacgagcagggcgatgtgcagcagggggaccatggccttgatgatggaattcaggaccacctggagacttgggactccagacaccagccgcagggggcgcagcacgcggaaggccctcagcgctttcacatcaaatccggcccctttccctccgagagcgttcgccccgtctgctttggttgcttgttctaaaattgcgctaaaaagccccacgaccacaatgataaaatcgagcagattccagccgttgcggaggtaggcattggggtgaaagaggagtccataggcgatgacttttaaaaatgcttccaccgtaaaaattatgagaaagagatattccactcgttccaggttggaattagtggcgttggaatcatcttctggaaagggaatatagatcgctaaggccacacaattggcaaaaatagtcagtaaaataattatttcaaatggtttccattcgacaatgctgatgcaggccctccggatggggttcttcagggtcaggcagagcagggctcggggcgggcgtgtggccgtggtgctgccctgcttcttgggtttcccatattgctgccgcttccgctgcgtggagctgactgtggagatggtcgcgttgccagcgctgcccatcagcttcgcctgccgggctgcgtcgatggccgcctgccaggacagggcggcccccggggtggggatgtgctcaggggccagtcccgcggccgcattggcattcatgttggcatgggcggggcgtgggctcccatagttggaacctccaggagagatgtagaaatagttgagttgagcttcgtgcaccaaagtacccttaaacttgacctccgtgtcggcagacaggtggctgggaagcggctggtatgcaggcgtaccaggctgaacaaaggctcgaagcattgtgaatttccagttgtatattaattggttgatttttaaagctaaataattaccctgctcatgatctcttgtaattttttaaaacccagaagccattcctgcagtaacatttcagtgccacaaaagtttacatggccatatcatatcgctgcaagtttaggttacagtaaaattacttttaaattttagaattctaaacaaaacaaaacaaaacaccttcttgcttgattcttttcaaccttgtattttctgtcttccctgctctgctcccagcc

SEQ ID NO: 19-20 - skipped (2 entries)

SEQ ID NO: 21 - RNA, 8602 nt, Homo sapiens
  source 1..8602: mol_type = mRNA
gtgcgcggggctcctcgccgccgctttcgctcgctcgctccgcgtctcggccggaggaggaggctgtggcgccggcgacagctacggcagcggcagccaccgcggcggctgcggcggcggcatctccgcctccactcccgcccgggactgccccccactgtctccccgcccctcccggacagtgagcccgcggcggggcgggggaaggagccgcccccaccccctccaagcccacccctaaagagatccctcctcccctcccccgccgcctggcgcggagccgggacgatgctgaccccttagatccggctccagctgcgccgcgggaagagggggcgcccctccccggacccccgccctccgccgctgccccccttttcgttcgccctctcggggcggcttcgccgaaggtagcgccgaatccggcaaccggagcctgggcgcgaagcgaagaagccggaacaaagtgagggggagccggccggctggcccgggaagccccaggggcgcaggggaagcgggactcgcgccgggcggggtttccctgcgccccggcgccccgcgggcagcatgcccctgcgggcagggggagctgggctgaactggccctcccgggggctcagcttgcgccctagagcccaccagatgtgcccccgccggggcccccgggttgcgtgaggacacctcctctgaggggcgccgcttgcccctctccggatcgcccggggccccggctggccagaggatggacgaggaggaggatggagcgggcgccgaggagtcgggacagccccggagcttcatgcggctcaacgacctgtcgggggccgggggccggccggggccggggtcagcagaaaaggacccgggcagcgcggactccgaggcggaggggctgccgtacccggcgctggccccggtggttttcttctacttgagccaggacagccgcccgcggagctggtgtctccgcacggtctgtaacccctggtttgagcgcatcagcatgttggtcatccttctcaactgcgtgaccctgggcatgttccggccatgcgaggacatcgcctgtgactcccagcgctgccggatcctgcaggcctttgatgacttcatctttgccttctttgccgtggagatggtggtgaagatggtggccttgggcatctttgggaaaaagtgttacctgggagacacttggaaccggcttgactttttcatcgtcatcgcagggatgctggagtactcgctggacctgcagaacgtcagcttctcagctgtcaggacagtccgtgtgctgcgaccgctcagggccattaaccgggtgcccagcatgcgcatccttgtcacgttgctgctggatacgctgcccatgctgggcaacgtcctgctgctctgcttcttcgtcttcttcatcttcggcatcgtcggcgtccagctgtgggcagggctgcttcggaaccgatgcttcctacctgagaatttcagcctccccctgagcgtggacctggagcgctattaccagacagagaacgaggatgagagccccttcatctgctcccagccacgcgagaacggcatgcggtcctgcagaagcgtgcccacgctgcgcggggacgggggcggtggcccaccttgcggtctggactatgaggcctacaacagctccagcaacaccacctgtgtcaactggaaccagtactacaccaactgctcagcgggggagcacaaccccttcaagggcgccatcaactttgacaacattggctatgcctggatcgccatcttccaggtcatcacgctggagggctgggtcgacatcatgtactttgtgatggatgctcattccttctacaatttcatctacttcatcctcctcatcatcgtgggctccttcttcatgatcaacctgtgcctggtggtgattgccacgcagttctcagagaccaagcagcgggaaagccagctgatgcgggagcagcgtgtgcggttcctgtccaacgccagcaccctggctagcttctctgagcccggcagctgctatgaggagctgctcaagtacctggtgtacatccttcgtaaggcagcccgcaggctggctcaggtctctcgggcagcaggtgtgcgggttgggctgctcagcagcccagcacccctcgggggccaggagacccagcccagcagcagctgctctcgctcccaccgccgcctatccgtccaccacctggtgcaccaccaccaccaccatcaccaccactaccacctgggcaatgggacgctcagggccccccgggccagcccggagatccaggacagggatgccaatgggtcccgccggctcatgctgccaccaccctcgacgcctgccctctccggggccccccctggtggcgcagagtctgtgcacagcttctaccatgccgactgccacttagagccagtccgctgccaggcgccccctcccaggtccccatctgaggcatccggcaggactgtgggcagcgggaaggtgtatcccaccgtgcacaccagccctccaccggagacgctgaaggagaaggcactagtagaggtggctgccagctctgggcccccaaccctcaccagcctcaacatcccacccgggccctacagctccatgcacaagctgctggagacacagagtacaggtgcctgccaaagctcttgcaagatctccagcccttgcttgaaagcagacagtggagcctgtggtccagacagctgcccctactgtgcccgggccggggcaggggaggtggagctcgccgaccgtgaaatgcctgactcagacagcgaggcagtttatgagttcacacaggatgcccagcacagcgacctccgggacccccacagccggcggcaacggagcctgggcccagatgcagagcccagctctgtgctggccttctggaggctaatctgtgacaccttccgaaagattgtggacagcaagtactttggccggggaatcatgatcgccatcctggtcaacacactcagcatgggcatcgaataccacgagcagcccgaggagcttaccaacgccctagaaatcagcaacatcgtcttcaccagcctctttgccctggagatgctgctgaagctgcttgtgtatggtccctttggctacatcaagaatccctacaacatcttcgatggtgtcattgtggtcatcagcgtgtgggagatcgtgggccagcaggggggcggcctgtcggtgctgcggaccttccgcctgatgcgtgtgctgaagctggtgcgcttcctgccggcgctgcagcggcagctggtggtgctcatgaagaccatggacaacgtggccaccttctgcatgctgcttatgctcttcatcttcatcttcagcatcctgggcatgcatctcttcggctgcaagtttgcctctgagcgggatggggacaccctgccagaccggaagaattttgactccttgctctgggccatcgtcactgtctttcagatcctgacccaggaggactggaacaaagtcctctacaatggtatggcctccacgtcgtcctgggcggccctttatttcattgccctcatgaccttcggcaactacgtgctcttcaatttgctggtcgccattctggtggagggcttccaggcggaggaaatcagcaaacgggaagatgcgagtggacagttaagctgtattcagctgcctgtcgactcccaggggggagatgccaacaagtccgaatcagagcccgatttcttctcacccagcctggatggtgatggggacaggaagaagtgcttggccttggtgtccctgggagagcacccggagctgcggaagagcctgctgccgcctctcatcatccacacggccgccacacccatgtcgctgcccaagagcaccagcacgggcctgggcgaggcgctgggccctgcgtcgcgccgcaccagcagcagcgggtcggcagagcctggggcggcccacgagatgaagtcaccgcccagcgcccgcagctctccgcacagcccctggagcgctgcaagcagctggaccagcaggcgctccagccggaacagcctcggccgtgcacccagcctgaagcggagaagcccaagtggagagcggcggtccctgttgtcgggagaaggccaggagagccaggatgaagaggagagctcagaagaggagcgggccagccctgcgggcagtgaccatcgccacagggggtccctggagcgggaggccaagagttcctttgacctgccagacacactgcaggtgccagggctgcatcgcactgccagtggccgagggtctgcttctgagcaccaggactgcaatggcaagtcggcttcagggcgcctggcccgggccctgcggcctgatgaccccccactggatggggatgacgccgatgacgagggcaacctgagcaaaggggaacgggtccgcgcgtggatccgagcccgactccctgcctgctgcctcgagcgagactcctggtcagcctacatcttccctcctcagtccaggttccgcctcctgtgtcaccggatcatcacccacaagatgttcgaccacgtggtccttgtcatcatcttccttaactgcatcaccatcgccatggagcgccccaaaattgacccccacagcgctgaacgcatcttcctgaccctctccaattacatcttcaccgcagtctttctggctgaaatgacagtgaaggtggtggcactgggctggtgcttcggggagcaggcgtacctgcggagcagttggaacgtgctggacgggctgttggtgctcatctccgtcatcgacattctggtgtccatggtctctgacagcggcaccaagatcctgggcatgctgagggtgctgcggctgctgcggaccctgcgcccgctcagggtgatcagccgggcgcaggggctgaagctggtggtggagacgctgatgtcctcactgaaacccatcggcaacattgtagtcatctgctgtgccttcttcatcattttcggcatcttgggggtgcagctcttcaaagggaagtttttcgtgtgccagggcgaggataccaggaacatcaccaataaatcggactgtgccgaggccagttaccggtgggtccggcacaagtacaactttgacaaccttggccaggccctgatgtccctgttcgttttggcctccaaggatggttgggtggacatcatgtacgatgggctggatgctgtgggcgtggaccagcagcccatcatgaaccacaacccctggatgctgctgtacttcatctcgttcctgctcattgtggccttctttgtcctgaacatgtttgtgggtgtggtggtggagaacttccacaagtgtcggcagcaccaggaggaagaggaggcccggcggcgggaggagaagcgcctacgaagactggagaaaaagagaaggaatctaatgctggacgatgtaattgcttccggcagctcagccagcgctgcgtcagaagcccagtgcaaaccttactactccgactactcccgcttccggctcctcgtccaccacttgtgcaccagccactacctggacctcttcatcacaggtgtcatcgggctgaacgtggtcaccatggccatggagcactaccagcagccccagattctggatgaggctctgaagatctgcaactacatcttcactgtcatctttgtcttggagtcagttttcaaacttgtggcctttggtttccgtcggttcttccaggacaggtggaaccagctggacctggccattgtgctgctgtccatcatgggcatcacgctggaggaaatcgaggtcaacgcctcgctgcccatcaaccccaccatcatccgcatcatgagggtgctgcgcattgcccgagtgctgaagctgctgaagatggctgtgggcatgcgggcgctgctggacacggtgatgcaggccctgccccaggtggggaacctgggacttctcttcatgttgttgtttttcatctttgcagctctgggcgtggagctctttggagacctggagtgtgacgagacacacccctgtgagggcctgggccgtcatgccacctttcggaactttggcatggccttcctaaccctcttccgagtctccacaggtgacaattggaatggcattatgaaggacaccctccgggactgtgaccaggagtccacctgctacaacacggtcatctcgcctatctactttgtgtccttcgtgctgacggcccagttcgtgctagtcaacgtggtgatcgccgtgctgatgaagcacctggaggagagcaacaaggaggccaaggaggaggccgagctagaggctgagctggagctggagatgaagaccctcagcccccagccccactcgccactgggcagccccttcctctggcctggggtcgagggccccgacagccccgacagccccaagcctggggctctgcacccagcggcccacgcgagatcagcctcccacttttccctggagcaccccacggacaggcagctgtttgacaccatatccctgctgatccagggctccctggagtgggagctgaagctgatggacgagctggcaggcccagggggccagccctctgccttcccttctgcccccagcctgggaggctccgacccacagatccctctagctgagatggaggctctgtctctgacgtcagagattgtgtctgaaccgtcctgctctctagctctgacggatgactctttgcctgatgacatgcacacactcttacttagtgccctggagagcaatatgcagccccaccccacggagctgccaggaccagacttactgactgtgcggaagtctggggtcagccgaacgcactctctgcccaatgacagctacatgtgtcggcatgggagcactgccgaggggcccctgggacacaggggctgggggctccccaaagctcagtcaggctccgtcttgtccgttcactcccagccagcagataccagctacatcctgcagcttcccaaagatgcacctcatctgctccagccccacagcgccccaacctggggcaccatccccaaactgcccccaccaggacgctcccctttggctcagaggccactcaggcgccaggcagcaataaggactgactccttggacgttcagggtctgggcagccgggaagacctgctggcagaggtgagtgggccctccccgcccctggcccgggcctactctttctggggccagtcaagtacccaggcacagcagcactcccgcagccacagcaagatctccaagcacatgaccccgccagccccttgcccaggcccagaacccaactggggcaagggccctccagagaccagaagcagcttagagttggacacggagctgagctggatttcaggagacctcctgccccctggcggccaggaggagcccccatccccacgggacctgaagaagtgctacagcgtggaggcccagagctgccagcgccggcctacgtcctggctggatgagcagaggagacactctatcgccgtcagctgcctggacagcggctcccaaccccacctgggcacagacccctctaaccttgggggccagcctcttggggggcctgggagccggcccaagaaaaaactcagcccgcctagtatcaccatagacccccccgagagccaaggtcctcggaccccgcccagccctggtatctgcctccggaggagggctccgtccagcgactccaaggatcccttggcctctggcccccctgacagcatggctgcctcgccctccccaaagaaagatgtgctgagtctctccggtttatcctctgacccagcagacctggacccctgagtcctgccccactttcccactcacctttctccactgggtgccaagtcctagctcctcctcctgggctatattcctgacaaaagttccatatagacaccaaggaggcggaggcgctcctccctgcctcagtggctctgggtacctgcaagcagaacttccaaagagagttaaaagcagcagccccggcaactctggctccaggcagaaggagaggcccggtgcagctgaggttcccgacaccagaagctgttgggagaaagcaatacgtttgtgcagaatctctatgtatattctattttattaaattaattgaatctagtatatgcgggatgtacgacattttgtgactgaagagacttgtttccttctacttttatgtgtctcagaatatttttgaggcgaaggcgtctgtctcttggctattttaacctaaaataacagtctagttatattccctcttcttgcaaagcacaagctgggaccgcgagcacattgcagccccaacggtggcccatcttcagcggagagcgagaaccattttggaaactgtaatgtaacttattttttcctttaacctcgtcatcattttctgtagggaaaaaaaaaagaaaaagaaaaaatgagattttacaagtgaaatggaacctttttatatatacatacatacatatctatctatctatctatatatatataaaataaagtaattttcctaaataaaaa

SEQ ID NO: 22 - RNA, 8602 nt, Homo sapiens
  source 1..8602: mol_type = mRNA
tttttatttaggaaaattactttattttatatatatatagatagatagatagatatgtatgtatgtatatataaaaaggttccatttcacttgtaaaatctcattttttctttttcttttttttttccctacagaaaatgatgacgaggttaaaggaaaaaataagttacattacagtttccaaaatggttctcgctctccgctgaagatgggccaccgttggggctgcaatgtgctcgcggtcccagcttgtgctttgcaagaagagggaatataactagactgttattttaggttaaaatagccaagagacagacgccttcgcctcaaaaatattctgagacacataaaagtagaaggaaacaagtctcttcagtcacaaaatgtcgtacatcccgcatatactagattcaattaatttaataaaatagaatatacatagagattctgcacaaacgtattgctttctcccaacagcttctggtgtcgggaacctcagctgcaccgggcctctccttctgcctggagccagagttgccggggctgctgcttttaactctctttggaagttctgcttgcaggtacccagagccactgaggcagggaggagcgcctccgcctccttggtgtctatatggaacttttgtcaggaatatagcccaggaggaggagctaggacttggcacccagtggagaaaggtgagtgggaaagtggggcaggactcaggggtccaggtctgctgggtcagaggataaaccggagagactcagcacatctttctttggggagggcgaggcagccatgctgtcaggggggccagaggccaagggatccttggagtcgctggacggagccctcctccggaggcagataccagggctgggcggggtccgaggaccttggctctcgggggggtctatggtgatactaggcgggctgagttttttcttgggccggctcccaggccccccaagaggctggcccccaaggttagaggggtctgtgcccaggtggggttgggagccgctgtccaggcagctgacggcgatagagtgtctcctctgctcatccagccaggacgtaggccggcgctggcagctctgggcctccacgctgtagcacttcttcaggtcccgtggggatgggggctcctcctggccgccagggggcaggaggtctcctgaaatccagctcagctccgtgtccaactctaagctgcttctggtctctggagggcccttgccccagttgggttctgggcctgggcaaggggctggcggggtcatgtgcttggagatcttgctgtggctgcgggagtgctgctgtgcctgggtacttgactggccccagaaagagtaggcccgggccaggggcggggagggcccactcacctctgccagcaggtcttcccggctgcccagaccctgaacgtccaaggagtcagtccttattgctgcctggcgcctgagtggcctctgagccaaaggggagcgtcctggtgggggcagtttggggatggtgccccaggttggggcgctgtggggctggagcagatgaggtgcatctttgggaagctgcaggatgtagctggtatctgctggctgggagtgaacggacaagacggagcctgactgagctttggggagcccccagcccctgtgtcccaggggcccctcggcagtgctcccatgccgacacatgtagctgtcattgggcagagagtgcgttcggctgaccccagacttccgcacagtcagtaagtctggtcctggcagctccgtggggtggggctgcatattgctctccagggcactaagtaagagtgtgtgcatgtcatcaggcaaagagtcatccgtcagagctagagagcaggacggttcagacacaatctctgacgtcagagacagagcctccatctcagctagagggatctgtgggtcggagcctcccaggctgggggcagaagggaaggcagagggctggccccctgggcctgccagctcgtccatcagcttcagctcccactccagggagccctggatcagcagggatatggtgtcaaacagctgcctgtccgtggggtgctccagggaaaagtgggaggctgatctcgcgtgggccgctgggtgcagagccccaggcttggggctgtcggggctgtcggggccctcgaccccaggccagaggaaggggctgcccagtggcgagtggggctgggggctgagggtcttcatctccagctccagctcagcctctagctcggcctcctccttggcctccttgttgctctcctccaggtgcttcatcagcacggcgatcaccacgttgactagcacgaactgggccgtcagcacgaaggacacaaagtagataggcgagatgaccgtgttgtagcaggtggactcctggtcacagtcccggagggtgtccttcataatgccattccaattgtcacctgtggagactcggaagagggttaggaaggccatgccaaagttccgaaaggtggcatgacggcccaggccctcacaggggtgtgtctcgtcacactccaggtctccaaagagctccacgcccagagctgcaaagatgaaaaacaacaacatgaagagaagtcccaggttccccacctggggcagggcctgcatcaccgtgtccagcagcgcccgcatgcccacagccatcttcagcagcttcagcactcgggcaatgcgcagcaccctcatgatgcggatgatggtggggttgatgggcagcgaggcgttgacctcgatttcctccagcgtgatgcccatgatggacagcagcacaatggccaggtccagctggttccacctgtcctggaagaaccgacggaaaccaaaggccacaagtttgaaaactgactccaagacaaagatgacagtgaagatgtagttgcagatcttcagagcctcatccagaatctggggctgctggtagtgctccatggccatggtgaccacgttcagcccgatgacacctgtgatgaagaggtccaggtagtggctggtgcacaagtggtggacgaggagccggaagcgggagtagtcggagtagtaaggtttgcactgggcttctgacgcagcgctggctgagctgccggaagcaattacatcgtccagcattagattccttctctttttctccagtcttcgtaggcgcttctcctcccgccgccgggcctcctcttcctcctggtgctgccgacacttgtggaagttctccaccaccacacccacaaacatgttcaggacaaagaaggccacaatgagcaggaacgagatgaagtacagcagcatccaggggttgtggttcatgatgggctgctggtccacgcccacagcatccagcccatcgtacatgatgtccacccaaccatccttggaggccaaaacgaacagggacatcagggcctggccaaggttgtcaaagttgtacttgtgccggacccaccggtaactggcctcggcacagtccgatttattggtgatgttcctggtatcctcgccctggcacacgaaaaacttccctttgaagagctgcacccccaagatgccgaaaatgatgaagaaggcacagcagatgactacaatgttgccgatgggtttcagtgaggacatcagcgtctccaccaccagcttcagcccctgcgcccggctgatcaccctgagcgggcgcagggtccgcagcagccgcagcaccctcagcatgcccaggatcttggtgccgctgtcagagaccatggacaccagaatgtcgatgacggagatgagcaccaacagcccgtccagcacgttccaactgctccgcaggtacgcctgctccccgaagcaccagcccagtgccaccaccttcactgtcatttcagccagaaagactgcggtgaagatgtaattggagagggtcaggaagatgcgttcagcgctgtgggggtcaattttggggcgctccatggcgatggtgatgcagttaaggaagatgatgacaaggaccacgtggtcgaacatcttgtgggtgatgatccggtgacacaggaggcggaacctggactgaggagggaagatgtaggctgaccaggagtctcgctcgaggcagcaggcagggagtcgggctcggatccacgcgcggacccgttcccctttgctcaggttgccctcgtcatcggcgtcatccccatccagtggggggtcatcaggccgcagggcccgggccaggcgccctgaagccgacttgccattgcagtcctggtgctcagaagcagaccctcggccactggcagtgcgatgcagccctggcacctgcagtgtgtctggcaggtcaaaggaactcttggcctcccgctccagggaccccctgtggcgatggtcactgcccgcagggctggcccgctcctcttctgagctctcctcttcatcctggctctcctggccttctcccgacaacagggaccgccgctctccacttgggcttctccgcttcaggctgggtgcacggccgaggctgttccggctggagcgcctgctggtccagctgcttgcagcgctccaggggctgtgcggagagctgcgggcgctgggcggtgacttcatctcgtgggccgccccaggctctgccgacccgctgctgctggtgcggcgcgacgcagggcccagcgcctcgcccaggcccgtgctggtgctcttgggcagcgacatgggtgtggcggccgtgtggatgatgagaggcggcagcaggctcttccgcagctccgggtgctctcccagggacaccaaggccaagcacttcttcctgtccccatcaccatccaggctgggtgagaagaaatcgggctctgattcggacttgttggcatctcccccctgggagtcgacaggcagctgaatacagcttaactgtccactcgcatcttcccgtttgctgatttcctccgcctggaagccctccaccagaatggcgaccagcaaattgaagagcacgtagttgccgaaggtcatgagggcaatgaaataaagggccgcccaggacgacgtggaggccataccattgtagaggactttgttccagtcctcctgggtcaggatctgaaagacagtgacgatggcccagagcaaggagtcaaaattcttccggtctggcagggtgtccccatcccgctcagaggcaaacttgcagccgaagagatgcatgcccaggatgctgaagatgaagatgaagagcataagcagcatgcagaaggtggccacgttgtccatggtcttcatgagcaccaccagctgccgctgcagcgccggcaggaagcgcaccagcttcagcacacgcatcaggcggaaggtccgcagcaccgacaggccgcccccctgctggcccacgatctcccacacgctgatgaccacaatgacaccatcgaagatgttgtagggattcttgatgtagccaaagggaccatacacaagcagcttcagcagcatctccagggcaaagaggctggtgaagacgatgttgctgatttctagggcgttggtaagctcctcgggctgctcgtggtattcgatgcccatgctgagtgtgttgaccaggatggcgatcatgattccccggccaaagtacttgctgtccacaatctttcggaaggtgtcacagattagcctccagaaggccagcacagagctgggctctgcatctgggcccaggctccgttgccgccggctgtgggggtcccggaggtcgctgtgctgggcatcctgtgtgaactcataaactgcctcgctgtctgagtcaggcatttcacggtcggcgagctccacctcccctgccccggcccgggcacagtaggggcagctgtctggaccacaggctccactgtctgctttcaagcaagggctggagatcttgcaagagctttggcaggcacctgtactctgtgtctccagcagcttgtgcatggagctgtagggcccgggtgggatgttgaggctggtgagggttgggggcccagagctggcagccacctctactagtgccttctccttcagcgtctccggtggagggctggtgtgcacggtgggatacaccttcccgctgcccacagtcctgccggatgcctcagatggggacctgggagggggcgcctggcagcggactggctctaagtggcagtcggcatggtagaagctgtgcacagactctgcgccaccagggggggccccggagagggcaggcgtcgagggtggtggcagcatgagccggcgggacccattggcatccctgtcctggatctccgggctggcccggggggccctgagcgtcccattgcccaggtggtagtggtggtgatggtggtggtggtggtgcaccaggtggtggacggataggcggcggtgggagcgagagcagctgctgctgggctgggtctcctggcccccgaggggtgctgggctgctgagcagcccaacccgcacacctgctgcccgagagacctgagccagcctgcgggctgccttacgaaggatgtacaccaggtacttgagcagctcctcatagcagctgccgggctcagagaagctagccagggtgctggcgttggacaggaaccgcacacgctgctcccgcatcagctggctttcccgctgcttggtctctgagaactgcgtggcaatcaccaccaggcacaggttgatcatgaagaaggagcccacgatgatgaggaggatgaagtagatgaaattgtagaaggaatgagcatccatcacaaagtacatgatgtcgacccagccctccagcgtgatgacctggaagatggcgatccaggcatagccaatgttgtcaaagttgatggcgcccttgaaggggttgtgctcccccgctgagcagttggtgtagtactggttccagttgacacaggtggtgttgctggagctgttgtaggcctcatagtccagaccgcaaggtgggccaccgcccccgtccccgcgcagcgtgggcacgcttctgcaggaccgcatgccgttctcgcgtggctgggagcagatgaaggggctctcatcctcgttctctgtctggtaatagcgctccaggtccacgctcagggggaggctgaaattctcaggtaggaagcatcggttccgaagcagccctgcccacagctggacgccgacgatgccgaagatgaagaagacgaagaagcagagcagcaggacgttgcccagcatgggcagcgtatccagcagcaacgtgacaaggatgcgcatgctgggcacccggttaatggccctgagcggtcgcagcacacggactgtcctgacagctgagaagctgacgttctgcaggtccagcgagtactccagcatccctgcgatgacgatgaaaaagtcaagccggttccaagtgtctcccaggtaacactttttcccaaagatgcccaaggccaccatcttcaccaccatctccacggcaaagaaggcaaagatgaagtcatcaaaggcctgcaggatccggcagcgctgggagtcacaggcgatgtcctcgcatggccggaacatgcccagggtcacgcagttgagaaggatgaccaacatgctgatgcgctcaaaccaggggttacagaccgtgcggagacaccagctccgcgggcggctgtcctggctcaagtagaagaaaaccaccggggccagcgccgggtacggcagcccctccgcctcggagtccgcgctgcccgggtccttttctgctgaccccggccccggccggcccccggcccccgacaggtcgttgagccgcatgaagctccggggctgtcccgactcctcggcgcccgctccatcctcctcctcgtccatcctctggccagccggggccccgggcgatccggagaggggcaagcggcgcccctcagaggaggtgtcctcacgcaacccgggggccccggcgggggcacatctggtgggctctagggcgcaagctgagcccccgggagggccagttcagcccagctccccctgcccgcaggggcatgctgcccgcggggcgccggggcgcagggaaaccccgcccggcgcgagtcccgcttcccctgcgcccctggggcttcccgggccagccggccggctccccctcactttgttccggcttcttcgcttcgcgcccaggctccggttgccggattcggcgctaccttcggcgaagccgccccgagagggcgaacgaaaaggggggcagcggcggagggcgggggtccggggaggggcgccccctcttcccgcggcgcagctggagccggatctaaggggtcagcatcgtcccggctccgcgccaggcggcgggggaggggaggagggatctctttaggggtgggcttggagggggtgggggcggctccttcccccgccccgccgcgggctcactgtccgggaggggcggggagacagtggggggcagtcccgggcgggagtggaggcggagatgccgccgccgcagccgccgcggtggctgccgctgccgtagctgtcgccggcgccacagcctcctcctccggccgagacgcggagcgagcgagcgaaagcggcggcgaggagccccgcgcac

SEQ ID NO: 23 - RNA, 8238 nt, Mus musculus
  source 1..8238: mol_type = mRNA
cggtcctctagcccgccgcggggcggaggaaggagccagcccccaccccctccaaacccacccccaaagagatccctcctcccctccccctccccccgccgtctctggcgtggagccgggacgatgctgaccccttagatcctgctccagctgcgccgagggaagagggggcgcccctccccggacccccgcccttcaccgggtggccccttttttcctcctcctctcgggggctgcttcaccgaaggtagcgcccattcgggcaaccggagcctgggcgcgaagggaagaagccggaacaaagtgaggggaagccggccggctagtcggggagcccccgggaacccaggggaagcgggactctcgccaggcggggcttccctgggacccggcgccccgcgggcagcatgcccctgagggcagggggagctgagctgaactggccctcctgggggctcagcaagctctctagagccccccacatgctcccccaccggggtcccccggttgtgtgaggacacctcctcggaggggctccgatcgcccctcttcggacccccgggaccccagctggccagaggatggatgaggaagaggatggagcgggcgccgaggagtcgggacagccccggagcttcacgcagctcaacgacctgtctggggccgggggccggcaggggccggggtcgacggaaaaggacccgggcagcgcggactccgaggcggaggggctgccctacccggcgctggccccggtggttttcttctacttgagccaggacagccgcccgcggagctggtgtctccgcacggtctgtaacccgtggttcgagcgagtcagcatgctggttattctcctcaactgtgtgactctgggtatgttcaggccgtgtgaggacattgcctgtgactcccaacgctgccggatcctgcaggccttcgacgacttcatctttgccttctttgctgtggaaatggtggtgaagatggtcgctttgggtatctttgggaagaaatgttacctgggagacacttggaaccggcttgacttttttatcgtcattgctgggatgctggagtactcgctggacctgcagaatgtcagcttctccgcagtcaggacagtccgtgtgctgcgaccgctcagggccattaaccgggtgcccagcatgcgcattctcgtcacattactgctggataccttgcctatgctgggcaatgtcctgctgctctgtttcttcgtctttttcatctttggcatcgttggtgttcagctgtgggcagggctacttcgaaaccgatgcttcctccctgagaatttcagcctcccgctgagtgtggacttggagccttactaccagacagagaatgaggacgagagccccttcatctgctctcagcctcgggagaacggcatgcgatcctgcaggagcgtgcccacactgcgcggggaaggcggtggtggtccaccctgcggtctggactatgaggcctataacagttccagcaataccacctgtgtcaactggaaccaatactataccaactgctctgcaggcgagcacaaccccttcaaaggcgccatcaactttgacaacattggctatgcctggatcgccatcttccaggtcatcacactggagggctgggtcgacatcatgtactttgtgatggatgctcattccttctacaacttcatctacttcattcttctcatcatcgtgggctccttcttcatgatcaacctgtgcctggtggtgatcgccacacagttctctgagaccaagcaacgggagagtcagctgatgcgggagcagcgtgtacgattcctgtccaatgctagcaccctggcaagcttctctgagccaggcagctgctatgaggagcttctcaagtacctggtgtacatcctccgcaaagcagcccgcaggctggcccaggtctctagggctgtaggcgtgcgggctgggttgctcagcagcccagtggcccgtggtgggcaggagccccagcccagtggcagctgctctcgttcacaccgtcgtctgtctgtccaccacctggtccaccaccatcaccaccaccatcaccactaccacctgggtaatgggacgctcagagttccccgggccagcccagagatccaggacagggatgccaatgggtcccgctggctcatgctgccaccaccctctacccccactccctctgggggccctccgaggggtgcggagtctgtacacagcttctaccatgctgactgccacttggagccagtccgttgccaggcgccccctcccaggtccccatcggaggcatctggcaggactgtgggtagtgggaaggtataccccactgtgcataccagccctccaccagagatgctgaaggataaggcactagtggaggtggcccccagccctgggccccccaccctcaccagcttcaacatcccacctgggcccttcagctccatgcacaagctcctggagacacagagtacgggagcctgccatagctcctgcaaaatctccagcccttgctccaaggcagacagtggagcctgtgggccggacagttgtccctactgtgcccggacaggagcaggggagccagagtccgctgaccatgaaatgcctgactcagacagtgaggctgtgtatgagttcacacaggacgctcagcacagcgacctccgggatccccacagacggcgacggccgagcctgggcccagatgcagagcctagttctgtgctggccttctggaggctgatctgcgacacattccggaagatcgtagatagcaaatactttggccggggaatcatgatcgctatcctggtcaataccctcagcatgggcatcgagtaccacgagcagcccgaggagctcaccaacgccctggaaatcagcaacatcgtcttcaccagcctcttcgccttggagatgctgctgaagctgctcgtctacggtcccttcggctacattaagaatccctacaacatctttgatggcgtcattgtggtcatcagcgtgtgggagattgtgggccagcagggaggtggcctgtcggtgctgcggaccttccgcctgatgcgggtgctgaagctagttcgcttcctgccggcactgcagcggcagctcgtggtgctcatgaagaccatggacaacgtggccaccttctgcatgctgctcatgctcttcatcttcatcttcagcatcctgggcatgcacctttttggttgcaagttcgcatctgaacgggatggggacacgttgccagaccggaagaattttgactccctgctctgggccattgtcactgtctttcagattctgactcaggaagactggaataaagtcctttacaacggcatggcctccacgtcatcttgggctgctctttacttcatcgccctcatgacttttggcaactacgtgctctttaacctgcttgtcgccattctcgtggagggtttccaggcagaggaaatcggcaaacgggaagatacgagtggacagttaagctgtattcagctgcctgtcaactcccaggggggagatgccaccaagtctgagtcagagcctgatttcttttcgcccagtgtggatggtgatggggacaggaagaagcgcttggccctggtggccttgggagaacactcggaactacgaaagagccttttgccacctctcatcatccacacagctgctacaccgatgtcactgcccaagagctccagcacaggtgtgggggaagcactgggctctggctctcgccgcaccagtagcagtgggtccgctgagcctggaactgcccatcatgagatgaaatcaccgccaagtgcccgaagctccccgcacagtccctggagcgcagcaagcagctggaccagcaggcgctccagccggaacagcctgggccgggcccccagcctgaagcgtaggagcccaagcggggagcggaggtccctgctgtctggagagggtcaggagagccaggatgaggaggagagttcagaagaggaccgggccagcccagcaggcagtgatcatcgccacaggggttccttggaacgtgaggccaagagttcctttgacctgcctgacaccctgcaggtgcccgggcttcatcgaacagccagcggtcggagctctgcctctgaacaccaagactgtaatggcaagtcggcttcagggcgtttggcccgcaccctgcgggctgatgaccccccactggatggggatgatggcgatgatgagggcaacctgagcaaaggggaacgcttacgagcctgggtccgagcccggctccctgcctgttgccgagagcgagattcctggtctgcctatatcttccctccccagtcaaggtttcgtctcctgtgtcaccggatcatcacccacaagatgtttgaccatgtggtcctcgtcatcatcttcctcaactgtatcaccatcgctatggagcgccccaaaattgacccccacagcgctgaacgcatcttcctgaccctctccaactacatcttcacggcagtcttcctggctgaaatgacagtgaaggtggtggcactgggctggtgctttggggagcaggcctacctgcgcagcagctggaacgtgctggacggcttgctggtgctcatctctgtcatcgacatcctggtgtccatggtctctgacagcggcaccaagattctcggcatgctgagggtgctgcggctgctgcggaccctacgtccactcagggtcatcagccgggcccaggggctgaagctggtggtagagactctgatgtcatccctcaaacccattggcaacattgtggtcatctgctgtgccttcttcatcatttttggaattcttggggtgcagctcttcaaagggaagttcttcgtgtgtcagggtgaggacaccaggaacatcactaacaagtccgactgtgctgaggccagttaccggtgggtccggcacaagtacaactttgacaacctgggccaggctctgatgtccctgtttgtgctggcctccaaggatggctgggttgacatcatgtatgatggactggatgctgtgggagtggaccagcagcccatcatgaaccacaacccttggatgctgctctacttcatctccttcctcctcatcgtggccttcttcgtcctgaacatgtttgtgggcgtggtggtggagaacttccataagtgcaggcagcaccaggaggaggaggaggcgcggcggcgggaggagaagcgactaaagaggctggagaaaaagagaaggagtaaggagaagcagatggccgatctaatgttggacgatgtaattgcttccggcagctcagccagcgctgcgtcagaagcccagtgcaaaccctactactctgactactcgcgcttccggctcctcgtccaccacctgtgtaccagccactacctggacctcttcatcactggtgtcatcgggctgaatgtggtcacgatggccatggaacattaccagcagccccagatcctggacgaggctctgaagatctgcaactacatctttaccgtcatctttgtcttggagtcagtattcaaacttgtggccttcggcttccgccggttcttccaggacaggtggaaccagctggacctggctattgtgcttctgtccatcatgggcatcacgctggaagagattgaggtcaatgcttcactgcccatcaaccccaccatcatccgtatcatgagggtgctccgcattgctcgagttctgaagctgttgaagatggctgtgggcatgcgggcactgctggacacggtgatgcaggccctgccccaggtggggaacctgggacttctcttcatgctattatttttcatctttgcagctctgggcgtggagctctttggagacctggagtgtgatgagacacacccttgtgagggcttgggccggcatgccacctttaggaactttggtatggcctttctgaccctcttccgagtctccactggtgacaactggaatggtattatgaaggacaccctccgggactgtgaccaggagtccacctgctacaacaccgtcatctcacccatctacttcgtgtccttcgtgctgacggcccagtttgtgctggtcaacgtggtcatagccgtgctgatgaagcacctggaagagagcaacaaagaggccaaggaggaggcggagttggaggcggagctggagctagagatgaagacactcagcccgcagccccactccccgctgggcagccccttcctctggcctggggtggaaggtgtcaatagccctgacagccctaagcctggggctccacacaccacggcccacattggagcagcctcttcaggcttctcccttgagcaccccacgatggtacctcacactgaggaggggccagtccccctaggaccagacctgctgactgtgaggaagtctggtgtcagccggacacactctctgcccaatgacagctacatgtgccgcaatgggagcactgccgagagatccctaggacacaggggctgggggctccccaaagcccagtcaggctccatcttgtctgttcactcccaaccagcagacaccagctgcatcctacagcttcccaaagatgcacactatctgctccagcctcatggggctcccacctggggcgccatccctaaactacccccacctggccgctcccctctggctcagaggcctctcaggcgccaggcagcaataaggactgactccctggacgtgcagggcctgggtagccgggaagacctgttgtcagaggtgagtgggccctcctgccctctgacccgctcctcatccttctggggcgggtcgagcatccaggtgcagcagcgctccggcagccagagcaaagtctccaagcacatccgcctgccagccccttgcccaggcctggaacccagctgggccaaggaccctcaagagaccagaagcagcttagagctggacacggagctgagctggatttcaggagacctcctgcccagcagtcaggaagaacccctgtccccacgggacttgaaaaaatgctacagtgtagaggcccagagctgccggcgcaggcctgggtcctggctagacgaacagaggagacactccatcgctgtcagctgcctggacagcggctcccagccccgcctatgtccaagcccctcaagcctcgggggccaacctcttgggggccctgggagccggcctaagaaaaaactcagcccacccagtatctctatagaccccccggagagccagggccctcggcccccatgcagtcctggcgtctgcctcaggaggagggcgccggccagtgactcgaaggatccctcggcctccagcccccttgacagcacggctgcctcaccctccccaaagaaagatgcgctgagtctctctggtttgtcttctgacccaacagacctggatccctgagtcctacccactctgtccccatcacctttctccactgggtgcagatcctagctccgcctcctgggcagtccttctgaaaagtcccatgtaagcagcaaaggggcgtaagtagccacgaggcacctcgcatgccttcttcagtggctgagggatgacaagcaggacttcctgagagtcagtctgaagagaacacagccctggagccccccggcctccgggaagaaggagaaggagatgcccagtgtggccaaggctctcgacaccaggagctgttgggagaaagcaatacgtttgtgcagaatctctatgtatattctattttattaaattaattgaatctagtatatgctggatgtacgacattttgtgactgaagagacttggttccttcttcttttatgtgtctcagaatatttttgaggcgaaagcgtctgtctcttggctattttaacctaaaataaccagtctagttctatcccctcttcttgtaaagcacaagccgggggccgtgagtgtattacaacccaacggcggcccatcttcaacggaaagcgagaaccattttggaaactgtcatgtaacttattttctcctttaacctcgtcatcgttttctgtaggggaaaaaaaagagaaaaagagaaaaaaaaatgagattttacaaatgaaatggaacctttttatatatatacatacatatctatatatctatatatctatataaaataaagtaattttccaaaataaaaagttaaaaaaaaaaaaaaaaa

SEQ ID NO: 24 - RNA, 8238 nt, Mus musculus
  source 1..8238: mol_type = mRNA
tttttttttttttttttaactttttattttggaaaattactttattttatatagatatatagatatatagatatgtatgtatatatataaaaaggttccatttcatttgtaaaatctcatttttttttctctttttctcttttttttcccctacagaaaacgatgacgaggttaaaggagaaaataagttacatgacagtttccaaaatggttctcgctttccgttgaagatgggccgccgttgggttgtaatacactcacggcccccggcttgtgctttacaagaagaggggatagaactagactggttattttaggttaaaatagccaagagacagacgctttcgcctcaaaaatattctgagacacataaaagaagaaggaaccaagtctcttcagtcacaaaatgtcgtacatccagcatatactagattcaattaatttaataaaatagaatatacatagagattctgcacaaacgtattgctttctcccaacagctcctggtgtcgagagccttggccacactgggcatctccttctccttcttcccggaggccggggggctccagggctgtgttctcttcagactgactctcaggaagtcctgcttgtcatccctcagccactgaagaaggcatgcgaggtgcctcgtggctacttacgcccctttgctgcttacatgggacttttcagaaggactgcccaggaggcggagctaggatctgcacccagtggagaaaggtgatggggacagagtgggtaggactcagggatccaggtctgttgggtcagaagacaaaccagagagactcagcgcatctttctttggggagggtgaggcagccgtgctgtcaagggggctggaggccgagggatccttcgagtcactggccggcgccctcctcctgaggcagacgccaggactgcatgggggccgagggccctggctctccggggggtctatagagatactgggtgggctgagttttttcttaggccggctcccagggcccccaagaggttggcccccgaggcttgaggggcttggacataggcggggctgggagccgctgtccaggcagctgacagcgatggagtgtctcctctgttcgtctagccaggacccaggcctgcgccggcagctctgggcctctacactgtagcattttttcaagtcccgtggggacaggggttcttcctgactgctgggcaggaggtctcctgaaatccagctcagctccgtgtccagctctaagctgcttctggtctcttgagggtccttggcccagctgggttccaggcctgggcaaggggctggcaggcggatgtgcttggagactttgctctggctgccggagcgctgctgcacctggatgctcgacccgccccagaaggatgaggagcgggtcagagggcaggagggcccactcacctctgacaacaggtcttcccggctacccaggccctgcacgtccagggagtcagtccttattgctgcctggcgcctgagaggcctctgagccagaggggagcggccaggtgggggtagtttagggatggcgccccaggtgggagccccatgaggctggagcagatagtgtgcatctttgggaagctgtaggatgcagctggtgtctgctggttgggagtgaacagacaagatggagcctgactgggctttggggagcccccagcccctgtgtcctagggatctctcggcagtgctcccattgcggcacatgtagctgtcattgggcagagagtgtgtccggctgacaccagacttcctcacagtcagcaggtctggtcctagggggactggcccctcctcagtgtgaggtaccatcgtggggtgctcaagggagaagcctgaagaggctgctccaatgtgggccgtggtgtgtggagccccaggcttagggctgtcagggctattgacaccttccaccccaggccagaggaaggggctgcccagcggggagtggggctgcgggctgagtgtcttcatctctagctccagctccgcctccaactccgcctcctccttggcctctttgttgctctcttccaggtgcttcatcagcacggctatgaccacgttgaccagcacaaactgggccgtcagcacgaaggacacgaagtagatgggtgagatgacggtgttgtagcaggtggactcctggtcacagtcccggagggtgtccttcataataccattccagttgtcaccagtggagactcggaagagggtcagaaaggccataccaaagttcctaaaggtggcatgccggcccaagccctcacaagggtgtgtctcatcacactccaggtctccaaagagctccacgcccagagctgcaaagatgaaaaataatagcatgaagagaagtcccaggttccccacctggggcagggcctgcatcaccgtgtccagcagtgcccgcatgcccacagccatcttcaacagcttcagaactcgagcaatgcggagcaccctcatgatacggatgatggtggggttgatgggcagtgaagcattgacctcaatctcttccagcgtgatgcccatgatggacagaagcacaatagccaggtccagctggttccacctgtcctggaagaaccggcggaagccgaaggccacaagtttgaatactgactccaagacaaagatgacggtaaagatgtagttgcagatcttcagagcctcgtccaggatctggggctgctggtaatgttccatggccatcgtgaccacattcagcccgatgacaccagtgatgaagaggtccaggtagtggctggtacacaggtggtggacgaggagccggaagcgcgagtagtcagagtagtagggtttgcactgggcttctgacgcagcgctggctgagctgccggaagcaattacatcgtccaacattagatcggccatctgcttctccttactccttctctttttctccagcctctttagtcgcttctcctcccgccgccgcgcctcctcctcctcctggtgctgcctgcacttatggaagttctccaccaccacgcccacaaacatgttcaggacgaagaaggccacgatgaggaggaaggagatgaagtagagcagcatccaagggttgtggttcatgatgggctgctggtccactcccacagcatccagtccatcatacatgatgtcaacccagccatccttggaggccagcacaaacagggacatcagagcctggcccaggttgtcaaagttgtacttgtgccggacccaccggtaactggcctcagcacagtcggacttgttagtgatgttcctggtgtcctcaccctgacacacgaagaacttccctttgaagagctgcaccccaagaattccaaaaatgatgaagaaggcacagcagatgaccacaatgttgccaatgggtttgagggatgacatcagagtctctaccaccagcttcagcccctgggcccggctgatgaccctgagtggacgtagggtccgcagcagccgcagcaccctcagcatgccgagaatcttggtgccgctgtcagagaccatggacaccaggatgtcgatgacagagatgagcaccagcaagccgtccagcacgttccagctgctgcgcaggtaggcctgctccccaaagcaccagcccagtgccaccaccttcactgtcatttcagccaggaagactgccgtgaagatgtagttggagagggtcaggaagatgcgttcagcgctgtgggggtcaattttggggcgctccatagcgatggtgatacagttgaggaagatgatgacgaggaccacatggtcaaacatcttgtgggtgatgatccggtgacacaggagacgaaaccttgactggggagggaagatataggcagaccaggaatctcgctctcggcaacaggcagggagccgggctcggacccaggctcgtaagcgttcccctttgctcaggttgccctcatcatcgccatcatccccatccagtggggggtcatcagcccgcagggtgcgggccaaacgccctgaagccgacttgccattacagtcttggtgttcagaggcagagctccgaccgctggctgttcgatgaagcccgggcacctgcagggtgtcaggcaggtcaaaggaactcttggcctcacgttccaaggaacccctgtggcgatgatcactgcctgctgggctggcccggtcctcttctgaactctcctcctcatcctggctctcctgaccctctccagacagcagggacctccgctccccgcttgggctcctacgcttcaggctgggggcccggcccaggctgttccggctggagcgcctgctggtccagctgcttgctgcgctccagggactgtgcggggagcttcgggcacttggcggtgatttcatctcatgatgggcagttccaggctcagcggacccactgctactggtgcggcgagagccagagcccagtgcttcccccacacctgtgctggagctcttgggcagtgacatcggtgtagcagctgtgtggatgatgagaggtggcaaaaggctctttcgtagttccgagtgttctcccaaggccaccagggccaagcgcttcttcctgtccccatcaccatccacactgggcgaaaagaaatcaggctctgactcagacttggtggcatctcccccctgggagttgacaggcagctgaatacagcttaactgtccactcgtatcttcccgtttgccgatttcctctgcctggaaaccctccacgagaatggcgacaagcaggttaaagagcacgtagttgccaaaagtcatgagggcgatgaagtaaagagcagcccaagatgacgtggaggccatgccgttgtaaaggactttattccagtcttcctgagtcagaatctgaaagacagtgacaatggcccagagcagggagtcaaaattcttccggtctggcaacgtgtccccatcccgttcagatgcgaacttgcaaccaaaaaggtgcatgcccaggatgctgaagatgaagatgaagagcatgagcagcatgcagaaggtggccacgttgtccatggtcttcatgagcaccacgagctgccgctgcagtgccggcaggaagcgaactagcttcagcacccgcatcaggcggaaggtccgcagcaccgacaggccacctccctgctggcccacaatctcccacacgctgatgaccacaatgacgccatcaaagatgttgtagggattcttaatgtagccgaagggaccgtagacgagcagcttcagcagcatctccaaggcgaagaggctggtgaagacgatgttgctgatttccagggcgttggtgagctcctcgggctgctcgtggtactcgatgcccatgctgagggtattgaccaggatagcgatcatgattccccggccaaagtatttgctatctacgatcttccggaatgtgtcgcagatcagcctccagaaggccagcacagaactaggctctgcatctgggcccaggctcggccgtcgccgtctgtggggatcccggaggtcgctgtgctgagcgtcctgtgtgaactcatacacagcctcactgtctgagtcaggcatttcatggtcagcggactctggctcccctgctcctgtccgggcacagtagggacaactgtccggcccacaggctccactgtctgccttggagcaagggctggagattttgcaggagctatggcaggctcccgtactctgtgtctccaggagcttgtgcatggagctgaagggcccaggtgggatgttgaagctggtgagggtggggggcccagggctgggggccacctccactagtgccttatccttcagcatctctggtggagggctggtatgcacagtggggtataccttcccactacccacagtcctgccagatgcctccgatggggacctgggagggggcgcctggcaacggactggctccaagtggcagtcagcatggtagaagctgtgtacagactccgcacccctcggagggcccccagagggagtgggggtagagggtggtggcagcatgagccagcgggacccattggcatccctgtcctggatctctgggctggcccggggaactctgagcgtcccattacccaggtggtagtggtgatggtggtggtgatggtggtggaccaggtggtggacagacagacgacggtgtgaacgagagcagctgccactgggctggggctcctgcccaccacgggccactgggctgctgagcaacccagcccgcacgcctacagccctagagacctgggccagcctgcgggctgctttgcggaggatgtacaccaggtacttgagaagctcctcatagcagctgcctggctcagagaagcttgccagggtgctagcattggacaggaatcgtacacgctgctcccgcatcagctgactctcccgttgcttggtctcagagaactgtgtggcgatcaccaccaggcacaggttgatcatgaagaaggagcccacgatgatgagaagaatgaagtagatgaagttgtagaaggaatgagcatccatcacaaagtacatgatgtcgacccagccctccagtgtgatgacctggaagatggcgatccaggcatagccaatgttgtcaaagttgatggcgcctttgaaggggttgtgctcgcctgcagagcagttggtatagtattggttccagttgacacaggtggtattgctggaactgttataggcctcatagtccagaccgcagggtggaccaccaccgccttccccgcgcagtgtgggcacgctcctgcaggatcgcatgccgttctcccgaggctgagagcagatgaaggggctctcgtcctcattctctgtctggtagtaaggctccaagtccacactcagcgggaggctgaaattctcagggaggaagcatcggtttcgaagtagccctgcccacagctgaacaccaacgatgccaaagatgaaaaagacgaagaaacagagcagcaggacattgcccagcataggcaaggtatccagcagtaatgtgacgagaatgcgcatgctgggcacccggttaatggccctgagcggtcgcagcacacggactgtcctgactgcggagaagctgacattctgcaggtccagcgagtactccagcatcccagcaatgacgataaaaaagtcaagccggttccaagtgtctcccaggtaacatttcttcccaaagatacccaaagcgaccatcttcaccaccatttccacagcaaagaaggcaaagatgaagtcgtcgaaggcctgcaggatccggcagcgttgggagtcacaggcaatgtcctcacacggcctgaacatacccagagtcacacagttgaggagaataaccagcatgctgactcgctcgaaccacgggttacagaccgtgcggagacaccagctccgcgggcggctgtcctggctcaagtagaagaaaaccaccggggccagcgccgggtagggcagcccctccgcctcggagtccgcgctgcccgggtccttttccgtcgaccccggcccctgccggcccccggccccagacaggtcgttgagctgcgtgaagctccggggctgtcccgactcctcggcgcccgctccatcctcttcctcatccatcctctggccagctggggtcccgggggtccgaagaggggcgatcggagcccctccgaggaggtgtcctcacacaaccgggggaccccggtgggggagcatgtggggggctctagagagcttgctgagcccccaggagggccagttcagctcagctccccctgccctcaggggcatgctgcccgcggggcgccgggtcccagggaagccccgcctggcgagagtcccgcttcccctgggttcccgggggctccccgactagccggccggcttcccctcactttgttccggcttcttcccttcgcgcccaggctccggttgcccgaatgggcgctaccttcggtgaagcagcccccgagaggaggaggaaaaaaggggccacccggtgaagggcgggggtccggggaggggcgccccctcttccctcggcgcagctggagcaggatctaaggggtcagcatcgtcccggctccacgccagagacggcggggggagggggaggggaggagggatctctttgggggtgggtttggagggggtgggggctggctccttcctccgccccgcggcgggctagaggaccg

SEQ ID NO: 25 - RNA, 8084 nt, Rattus norvegicus
  source 1..8084: mol_type = mRNA
ccgtctctggcgcggagccgggacgatgctgaccccttagatcctgctccagctgcgccgagggaagagggggcgcccctccccggacccccgccctccatcgggtggccccttttttttctcttcctctcgggggctgcttcgccgaaggtagcgcctgttcgggcaaccggagcctgggcgcgaagcgaagaagccggaacaaagtgaggggaagccggccggctagtcggggagcccccgggaacccaggggaagcgggactctagccaggcggggcttccctgagacccggcgccccgcgggcagcatgcccctgagggcagggggagctgagctgaactggccctcctggggactcagcaagctctctagagccccccacatgctcccccaccggggtcccccggttgcgtgaggacacctcctctgaggggctccgctcgcccctcttcggaccccccggggccccggctggccagaggatggacgaggaggaggatggagcgggcgccgaggagtcgggacagccccgtagcttcacgcagctcaacgacctgtccggggccgggggccggcaggggccggggtcgacggaaaaggacccgggcagcgcggactccgaggcggaggggctgccgtacccggcgctagccccggtggttttcttctacttgagccaggacagccgcccgcggagctggtgtctccgcacggtctgtaacccgtggttcgagcgagtcagtatgctggtcattcttctcaactgtgtgactctgggtatgttcaggccgtgtgaggacattgcctgtgactcccagcgctgccggatcctgcaggccttcgatgacttcatctttgccttctttgctgtggaaatggtggtgaagatggtggccttgggcatctttgggaagaaatgttacctgggagacacttggaaccggcttgactttttcattgtcattgcagggatgctggagtattcgctggacctgcagaacgtcagcttctccgcagtcaggacagtccgtgtgctgcgaccgctcagggccattaaccgggtgcccagcatgcgcattctcgtcacattactgctggacaccttgcctatgctgggcaacgtcctgctgctctgtttcttcgtctttttcatctttggcatcgtgggcgtccagctgtgggcaggactgcttcgcaaccgatgcttcctccccgagaacttcagcctccccctgagcgtggacctggagccttattaccagacagagaatgaggacgagagccccttcatctgctctcagcctcgggagaatggcatgagatcctgcaggagtgtgcccacactgcgtggggaaggcggtggtggcccaccctgcagtctggactatgagacctataacagttccagcaacaccacctgtgtcaactggaaccagtactataccaactgctctgcgggcgagcacaaccccttcaaaggcgccatcaactttgacaacattggctatgcctggatcgccatcttccaggtcatcacactggagggctgggtcgacatcatgtacttcgtaatggacgctcactccttctacaacttcatctacttcattcttctcatcatcgtgggctccttcttcatgatcaacctgtgcctggtggtgattgccacgcagttctccgagaccaaacagcgggagagtcagctgatgcgggagcagcgtgtacgattcctgtccaatgctagcaccctggcaagcttctctgagccaggcagctgctatgaggagctactcaagtacctggtgtacatcctccgaaaagcagcccgaaggctggcccaggtctctagggctataggcgtgcgggctgggctgctcagcagcccagtggcccgtagtgggcaggagccccagcccagtggcagctgcactcgctcacaccgtcgtctgtctgtccaccacctggtccaccaccatcaccaccaccatcaccactaccacctgggtaatgggacgctcagagttccccgggccagcccagagatccaggacagggatgccaatgggtctcgccggctcatgctaccaccaccctctacacccactccctctgggggccctccgaggggtgcggagtctgtacacagcttctaccatgctgactgccacttggagccagtccgttgccaggcaccccctcccagatgcccatcggaggcatctggtaggactgtgggtagtgggaaggtgtaccccactgtgcataccagccctccaccagagatactgaaggataaagcactagtggaggtggcccccagccctgggccccccaccctcaccagcttcaacatcccacctgggcccttcagctccatgcacaagctcctggagacacagagtacgggagcctgccatagctcctgcaaaatctccagcccttgctccaaggcagacagtggagcctgcgggccggacagttgtccctactgtgcccggacaggagcaggagagccagagtccgctgaccatgtcatgcctgactcagacagcgaggctgtgtatgagttcacacaggacgctcagcacagtgacctccgggatccccacagccggcggcgacagcggagcctgggcccagatgcagagcctagttctgtgctggctttctggaggctgatctgtgacacattccggaagatcgtagatagcaaatactttggccggggaatcatgatcgccatcctggtcaatacactcagcatgggcatcgagtaccacgagcagcccgaggagctcaccaacgccctggaaatcagcaacatcgtcttcaccagcctcttcgccttggagatgctgctgaaactgcttgtctacggtccctttggctacattaagaatccctacaacatctttgatggtgtcattgtggtcatcagtgtgtgggagattgtgggccagcagggaggtggcctgtcggtgctgcggaccttccgcctgatgcgggtgctgaagctggtgcgcttcctgccggccctgcagcgccagctcgtggtgctcatgaagaccatggacaacgtggccaccttctgcatgctcctcatgctgttcatcttcatcttcagcatcctgggcatgcatctctttggttgcaagttcgcatctgaacgggatggggacacgttgccagaccggaagaatttcgactccctgctctgggccatcgtcactgtctttcagattctgactcaggaagactggaataaagtcctctacaacggcatggcctccacatcgtcttgggctgctctttacttcatcgccctcatgacttttggcaactatgtgctctttaacctgctggtggccattcttgtggaaggcttccaggcagaggaaatcggcaaacgggaagatgcgagtggacagttaagctgtattcagctgcctgtcaactctcaggggggagatgccaccaagtctgagtcagagcctgatttcttttcgcccagtgtggatggtgatggggacagaaagaagcgcttggccctggtggctttgggagaacacgcggaactacgaaagagccttttgccacccctcatcatccatacggctgcgacaccaatgtcactacccaagagctccagcacaggtgtgggggaagcactgggctctggctctcgacgtaccagtagcagtgggtccgctgagcctggagctgcccaccatgagatgaaatctccgccaagtgcccgcagctccccgcacagtccctggagtgcggcaagcagctggaccagcaggcgctccagcaggaacagcctgggccgggcccccagcctaaagcggaggagcccgagcggggagcggaggtccctgctgtctggagagggccaggagagtcaggatgaggaggaaagttcagaagaggaccgggccagcccagcaggcagtgaccatcgccacaggggttccttggaacgtgaggccaagagttcctttgacctgcctgacactctgcaggtgccggggctgcaccgcacagccagcggccggagctctgcctctgagcaccaagactgtaatggcaagtcggcttcagggcgtttggcccgcaccctgaggactgatgacccccaactggatggggatgatgacaatgatgagggaaatctgagcaaaggggaacgcatacaagcctgggtcagatcccggcttcctgcctgttgccgagagcgagattcctggtcggcctatatctttcctcctcagtcaaggtttcgtctcctgtgtcaccggatcatcacccacaagatgtttgaccatgtggtcctcgtcatcatcttcctcaactgtatcaccatcgctatggagcgccccaaaattgacccccacagcgctgagcgcatcttcctgaccctctccaactacatcttcacggcagtctttctagctgaaatgacagtgaaggtggtggcactgggctggtgctttggggagcaggcctacctgcgcagcagctggaatgtgctggacggcttgctggtgctcatctccgtcatcgacatcctggtctccatggtctccgacagcggcaccaagatccttggcatgctgagggtgctgcggctgctgcggaccctgcgtccactcagggtcatcagccgggcccagggactgaagctggtggtagagactctgatgtcatccctcaaacccattggcaacattgtggtcatttgctgtgccttcttcatcatttttggaattctcggggtgcagctcttcaaagggaagttcttcgtgtgtcagggtgaggacaccaggaacatcactaacaaatccgactgcgctgaggccagctaccgatgggtccggcacaagtacaactttgacaacctgggccaggctctgatgtccctgtttgtgctggcctccaaggatggttgggttgacatcatgtatgatgggctggatgctgtgggtgtggatcagcagcccatcatgaaccacaacccctggatgctgctatacttcatctccttcctcctcatcgtggccttctttgtcctgaacatgtttgtgggcgtggtggtggagaacttccataagtgcagacagcaccaggaggaggaggaggcgaggcggcgtgaggagaagcgactacggaggctggagaaaaagagaaggaatctaatgttggacgatgtaattgcttccggcagctcagccagcgctgcgtcagaagcccagtgcaagccctactactctgactactcgagattccggctccttgtccaccacctgtgtaccagccactacctggacctcttcatcactggtgtcatcgggctgaacgtggtcactatggccatggaacattaccagcagccccagatcctggacgaggctctgaagatctgcaattacatctttaccgtcatctttgtctttgagtcagttttcaaacttgtggcctttggcttccgccgtttcttccaggacaggtggaaccagctggacctggctattgtgcttctgtccatcatgggcatcacactggaggagattgaggtcaatgcttcgctgcccatcaaccccaccatcatccgtatcatgagggtgctccgcattgctcgagttctgaagctgttgaagatggctgtgggcatgcgggcactgctggacacggtgatgcaggccctgccccaggtggggaacctgggacttctcttcatgttattgtttttcatctttgcagctctgggcgtggagctctttggagacctggagtgtgatgagacacacccttgtgagggcttgggtcggcatgccacctttaggaactttggtatggcctttctgaccctcttccgagtctccactggtgacaactggaatggtattatgaaggacaccctccgggactgtgaccaggagtccacctgctacaacactgtcatctcccctatctactttgtgtccttcgtgctgacggcccagtttgtgctggtcaacgtggtcatagctgtgctgatgaagcacctggaagaaagcaacaaagaggccaaggaggaggccgagctcgaggccgagctggagctggagatgaagacgctcagcccgcagccccactccccgctgggcagccccttcctctggcccggggtggagggtgtcaacagtcctgacagccctaagcctggggctccacacaccactgcccacattggagcagcctcgggcttctcccttgagcaccccacgatggtaccccaccccgaggaggtgccagtccccctaggaccagacctgctgactgtgaggaagtctggtgtcagccggacgcactctctgcccaatgacagctacatgtgccgcaatgggagcactgctgagagatccctaggacacaggggctgggggctccccaaagcccagtcaggctccatcttgtccgttcactcccaaccagcagacaccagctgcatcctacagcttcccaaagatgtgcactatctgctccagcctcatggggcccccacctggggcgccatccctaaactacccccacctggccgctcccctctggctcagaggcctctcaggcgccaggcagcaataaggactgactccctggatgtgcagggcctgggtagccgggaagacctgttgtcagaggtgagtgggccctcctgccctctgacccggtcctcatccttctggggcgggtcgagcatccaggtgcagcagcgttccggcatccagagcaaagtctccaagcacatccgcctgccagccccttgcccaggcctggaacccagctgggccaaggaccctccagagaccagaagcagcttagagctggacacggagctgagctggatttcaggagacctccttcccagcagccaggaagaacccctgtccccacgggacctgaagaagtgctacagtgtagagacccagagctgcaggcgcaggcctgggtcctggctagatgaacagcggagacactccattgctgtcagctgtctggacagcggctcccaaccccgcctatgtccaagcccctcaagcctcgggggccaacctcttgggggtcctgggagccggcctaagaaaaaactcagcccacccagtatctctatagaccccccggagagccagggctctcggcccccatgcagtcctggtgtctgcctcaggaggagggcgccggccagtgactctaaggatccctcggtctccagcccccttgacagcacggctgcctcaccctccccaaagaaagacacgctgagtctctctggtttgtcttctgacccaacagacatggacccctgagtcctacccactctcccccatcacctttctccaccgggtgcagatcctagctccgcctcctgggcagcgtttctgaaaagtcccacgtaagcagcaagcagccacgaggcacctcacctgccttcttcagtggctggtggggatgacgagcagaacttccggagagtcgatctgaagagaacacagccctggagcccctgcctccgggaagaaggaaaaggagaaagcccagtgtggccaaggctcccgacaccaggagctgttgggagaaagcaatacgtttgtgcagaatctctatgtatattctattttattaaattaattgaatctagtatatgctggatgtacgacattttgtgactgaagagacttggttccttctacttttatgtgtctcagaatatttttgaggcgaaagcgtctgtctcttggctattttaacctaaaataaccagtctagttatattccctcttcttgtaaagcacaagctgggagcgtgagtgtattacaacccaacggcggcccatcttcagcaggaagcaagaaccattttggaaactgtcatgtaacttactttctcctttaacctcgtcatcgttttctgtagggggaaaaaaaacagagaaaaagagaaaaaaatgagttttacaaatgaaatggaacctttttatatatacatacatacatatctatatatctatataaaataaagtaattttccaaaataaaaa

SEQ ID NO: 26 - RNA, 8084 nt, Rattus norvegicus
  source 1..8084: mol_type = mRNA
tttttattttggaaaattactttattttatatagatatatagatatgtatgtatgtatatataaaaaggttccatttcatttgtaaaactcatttttttctctttttctctgttttttttccccctacagaaaacgatgacgaggttaaaggagaaagtaagttacatgacagtttccaaaatggttcttgcttcctgctgaagatgggccgccgttgggttgtaatacactcacgctcccagcttgtgctttacaagaagagggaatataactagactggttattttaggttaaaatagccaagagacagacgctttcgcctcaaaaatattctgagacacataaaagtagaaggaaccaagtctcttcagtcacaaaatgtcgtacatccagcatatactagattcaattaatttaataaaatagaatatacatagagattctgcacaaacgtattgctttctcccaacagctcctggtgtcgggagccttggccacactgggctttctccttttccttcttcccggaggcaggggctccagggctgtgttctcttcagatcgactctccggaagttctgctcgtcatccccaccagccactgaagaaggcaggtgaggtgcctcgtggctgcttgctgcttacgtgggacttttcagaaacgctgcccaggaggcggagctaggatctgcacccggtggagaaaggtgatgggggagagtgggtaggactcaggggtccatgtctgttgggtcagaagacaaaccagagagactcagcgtgtctttctttggggagggtgaggcagccgtgctgtcaagggggctggagaccgagggatccttagagtcactggccggcgccctcctcctgaggcagacaccaggactgcatgggggccgagagccctggctctccggggggtctatagagatactgggtgggctgagttttttcttaggccggctcccaggacccccaagaggttggcccccgaggcttgaggggcttggacataggcggggttgggagccgctgtccagacagctgacagcaatggagtgtctccgctgttcatctagccaggacccaggcctgcgcctgcagctctgggtctctacactgtagcacttcttcaggtcccgtggggacaggggttcttcctggctgctgggaaggaggtctcctgaaatccagctcagctccgtgtccagctctaagctgcttctggtctctggagggtccttggcccagctgggttccaggcctgggcaaggggctggcaggcggatgtgcttggagactttgctctggatgccggaacgctgctgcacctggatgctcgacccgccccagaaggatgaggaccgggtcagagggcaggagggcccactcacctctgacaacaggtcttcccggctacccaggccctgcacatccagggagtcagtccttattgctgcctggcgcctgagaggcctctgagccagaggggagcggccaggtgggggtagtttagggatggcgccccaggtgggggccccatgaggctggagcagatagtgcacatctttgggaagctgtaggatgcagctggtgtctgctggttgggagtgaacggacaagatggagcctgactgggctttggggagcccccagcccctgtgtcctagggatctctcagcagtgctcccattgcggcacatgtagctgtcattgggcagagagtgcgtccggctgacaccagacttcctcacagtcagcaggtctggtcctagggggactggcacctcctcggggtggggtaccatcgtggggtgctcaagggagaagcccgaggctgctccaatgtgggcagtggtgtgtggagccccaggcttagggctgtcaggactgttgacaccctccaccccgggccagaggaaggggctgcccagcggggagtggggctgcgggctgagcgtcttcatctccagctccagctcggcctcgagctcggcctcctccttggcctctttgttgctttcttccaggtgcttcatcagcacagctatgaccacgttgaccagcacaaactgggccgtcagcacgaaggacacaaagtagataggggagatgacagtgttgtagcaggtggactcctggtcacagtcccggagggtgtccttcataataccattccagttgtcaccagtggagactcggaagagggtcagaaaggccataccaaagttcctaaaggtggcatgccgacccaagccctcacaagggtgtgtctcatcacactccaggtctccaaagagctccacgcccagagctgcaaagatgaaaaacaataacatgaagagaagtcccaggttccccacctggggcagggcctgcatcaccgtgtccagcagtgcccgcatgcccacagccatcttcaacagcttcagaactcgagcaatgcggagcaccctcatgatacggatgatggtggggttgatgggcagcgaagcattgacctcaatctcctccagtgtgatgcccatgatggacagaagcacaatagccaggtccagctggttccacctgtcctggaagaaacggcggaagccaaaggccacaagtttgaaaactgactcaaagacaaagatgacggtaaagatgtaattgcagatcttcagagcctcgtccaggatctggggctgctggtaatgttccatggccatagtgaccacgttcagcccgatgacaccagtgatgaagaggtccaggtagtggctggtacacaggtggtggacaaggagccggaatctcgagtagtcagagtagtagggcttgcactgggcttctgacgcagcgctggctgagctgccggaagcaattacatcgtccaacattagattccttctctttttctccagcctccgtagtcgcttctcctcacgccgcctcgcctcctcctcctcctggtgctgtctgcacttatggaagttctccaccaccacgcccacaaacatgttcaggacaaagaaggccacgatgaggaggaaggagatgaagtatagcagcatccaggggttgtggttcatgatgggctgctgatccacacccacagcatccagcccatcatacatgatgtcaacccaaccatccttggaggccagcacaaacagggacatcagagcctggcccaggttgtcaaagttgtacttgtgccggacccatcggtagctggcctcagcgcagtcggatttgttagtgatgttcctggtgtcctcaccctgacacacgaagaacttccctttgaagagctgcaccccgagaattccaaaaatgatgaagaaggcacagcaaatgaccacaatgttgccaatgggtttgagggatgacatcagagtctctaccaccagcttcagtccctgggcccggctgatgaccctgagtggacgcagggtccgcagcagccgcagcaccctcagcatgccaaggatcttggtgccgctgtcggagaccatggagaccaggatgtcgatgacggagatgagcaccagcaagccgtccagcacattccagctgctgcgcaggtaggcctgctccccaaagcaccagcccagtgccaccaccttcactgtcatttcagctagaaagactgccgtgaagatgtagttggagagggtcaggaagatgcgctcagcgctgtgggggtcaattttggggcgctccatagcgatggtgatacagttgaggaagatgatgacgaggaccacatggtcaaacatcttgtgggtgatgatccggtgacacaggagacgaaaccttgactgaggaggaaagatataggccgaccaggaatctcgctctcggcaacaggcaggaagccgggatctgacccaggcttgtatgcgttcccctttgctcagatttccctcatcattgtcatcatccccatccagttgggggtcatcagtcctcagggtgcgggccaaacgccctgaagccgacttgccattacagtcttggtgctcagaggcagagctccggccgctggctgtgcggtgcagccccggcacctgcagagtgtcaggcaggtcaaaggaactcttggcctcacgttccaaggaacccctgtggcgatggtcactgcctgctgggctggcccggtcctcttctgaactttcctcctcatcctgactctcctggccctctccagacagcagggacctccgctccccgctcgggctcctccgctttaggctgggggcccggcccaggctgttcctgctggagcgcctgctggtccagctgcttgccgcactccagggactgtgcggggagctgcgggcacttggcggagatttcatctcatggtgggcagctccaggctcagcggacccactgctactggtacgtcgagagccagagcccagtgcttcccccacacctgtgctggagctcttgggtagtgacattggtgtcgcagccgtatggatgatgaggggtggcaaaaggctctttcgtagttccgcgtgttctcccaaagccaccagggccaagcgcttctttctgtccccatcaccatccacactgggcgaaaagaaatcaggctctgactcagacttggtggcatctcccccctgagagttgacaggcagctgaatacagcttaactgtccactcgcatcttcccgtttgccgatttcctctgcctggaagccttccacaagaatggccaccagcaggttaaagagcacatagttgccaaaagtcatgagggcgatgaagtaaagagcagcccaagacgatgtggaggccatgccgttgtagaggactttattccagtcttcctgagtcagaatctgaaagacagtgacgatggcccagagcagggagtcgaaattcttccggtctggcaacgtgtccccatcccgttcagatgcgaacttgcaaccaaagagatgcatgcccaggatgctgaagatgaagatgaacagcatgaggagcatgcagaaggtggccacgttgtccatggtcttcatgagcaccacgagctggcgctgcagggccggcaggaagcgcaccagcttcagcacccgcatcaggcggaaggtccgcagcaccgacaggccacctccctgctggcccacaatctcccacacactgatgaccacaatgacaccatcaaagatgttgtagggattcttaatgtagccaaagggaccgtagacaagcagtttcagcagcatctccaaggcgaagaggctggtgaagacgatgttgctgatttccagggcgttggtgagctcctcgggctgctcgtggtactcgatgcccatgctgagtgtattgaccaggatggcgatcatgattccccggccaaagtatttgctatctacgatcttccggaatgtgtcacagatcagcctccagaaagccagcacagaactaggctctgcatctgggcccaggctccgctgtcgccgccggctgtggggatcccggaggtcactgtgctgagcgtcctgtgtgaactcatacacagcctcgctgtctgagtcaggcatgacatggtcagcggactctggctctcctgctcctgtccgggcacagtagggacaactgtccggcccgcaggctccactgtctgccttggagcaagggctggagattttgcaggagctatggcaggctcccgtactctgtgtctccaggagcttgtgcatggagctgaagggcccaggtgggatgttgaagctggtgagggtggggggcccagggctgggggccacctccactagtgctttatccttcagtatctctggtggagggctggtatgcacagtggggtacaccttcccactacccacagtcctaccagatgcctccgatgggcatctgggagggggtgcctggcaacggactggctccaagtggcagtcagcatggtagaagctgtgtacagactccgcacccctcggagggcccccagagggagtgggtgtagagggtggtggtagcatgagccggcgagacccattggcatccctgtcctggatctctgggctggcccggggaactctgagcgtcccattacccaggtggtagtggtgatggtggtggtgatggtggtggaccaggtggtggacagacagacgacggtgtgagcgagtgcagctgccactgggctggggctcctgcccactacgggccactgggctgctgagcagcccagcccgcacgcctatagccctagagacctgggccagccttcgggctgcttttcggaggatgtacaccaggtacttgagtagctcctcatagcagctgcctggctcagagaagcttgccagggtgctagcattggacaggaatcgtacacgctgctcccgcatcagctgactctcccgctgtttggtctcggagaactgcgtggcaatcaccaccaggcacaggttgatcatgaagaaggagcccacgatgatgagaagaatgaagtagatgaagttgtagaaggagtgagcgtccattacgaagtacatgatgtcgacccagccctccagtgtgatgacctggaagatggcgatccaggcatagccaatgttgtcaaagttgatggcgcctttgaaggggttgtgctcgcccgcagagcagttggtatagtactggttccagttgacacaggtggtgttgctggaactgttataggtctcatagtccagactgcagggtgggccaccaccgccttccccacgcagtgtgggcacactcctgcaggatctcatgccattctcccgaggctgagagcagatgaaggggctctcgtcctcattctctgtctggtaataaggctccaggtccacgctcagggggaggctgaagttctcggggaggaagcatcggttgcgaagcagtcctgcccacagctggacgcccacgatgccaaagatgaaaaagacgaagaaacagagcagcaggacgttgcccagcataggcaaggtgtccagcagtaatgtgacgagaatgcgcatgctgggcacccggttaatggccctgagcggtcgcagcacacggactgtcctgactgcggagaagctgacgttctgcaggtccagcgaatactccagcatccctgcaatgacaatgaaaaagtcaagccggttccaagtgtctcccaggtaacatttcttcccaaagatgcccaaggccaccatcttcaccaccatttccacagcaaagaaggcaaagatgaagtcatcgaaggcctgcaggatccggcagcgctgggagtcacaggcaatgtcctcacacggcctgaacatacccagagtcacacagttgagaagaatgaccagcatactgactcgctcgaaccacgggttacagaccgtgcggagacaccagctccgcgggcggctgtcctggctcaagtagaagaaaaccaccggggctagcgccgggtacggcagcccctccgcctcggagtccgcgctgcccgggtccttttccgtcgaccccggcccctgccggcccccggccccggacaggtcgttgagctgcgtgaagctacggggctgtcccgactcctcggcgcccgctccatcctcctcctcgtccatcctctggccagccggggccccggggggtccgaagaggggcgagcggagcccctcagaggaggtgtcctcacgcaaccgggggaccccggtgggggagcatgtggggggctctagagagcttgctgagtccccaggagggccagttcagctcagctccccctgccctcaggggcatgctgcccgcggggcgccgggtctcagggaagccccgcctggctagagtcccgcttcccctgggttcccgggggctccccgactagccggccggcttcccctcactttgttccggcttcttcgcttcgcgcccaggctccggttgcccgaacaggcgctaccttcggcgaagcagcccccgagaggaagagaaaaaaaaggggccacccgatggagggcgggggtccggggaggggcgccccctcttccctcggcgcagctggagcaggatctaaggggtcagcatcgtcccggctccgcgccagagacgg

SEQ ID NO: 27 - RNA, 10040 nt, Macaca mulatta
  source 1..10040: mol_type = mRNA
ccgggctcctcgccgccgctttcgctcgctcgctccgcgtctcggccggaggaggaggcagtggcgccggcgacagctacggcagcggcagccaccgcggcggctgcggcggcggcatctccgcctccactcccgcccgggactgccccccaccgtctccccgcccctcccggaccgtgagcccgccgcggggcgggggaaggagccgcccccaccccctccaagcccacccctaaagagatccctcctcccctcccccgccgcctggcgcggagccgggacgatgctgaccccttagatccggctccagctgcgccgcgggaagagggggcgcccctccccggacccccgcccttcgccgctgccccccttttcgctcgccctctcggggccgcttcgccgaaggtagcgccgaatccggcaaccggagcctgggcgcgaagcgaagaagccggaacaaagtgagggggagccggccggctggcccggggagccccaggggcgcaggggaagcgggacttgcgccgggcggggtttccctgcgccccggcgccccgcgggcagcatgcccctgcgggcagggggagctggactgaactggccctcccgggggctcagcttgcgccctagagccccccagatgtgcccccgccggggctcccgggttgcgtgaggacatctcctcggaggggcgccgcttgcccctctccggaccgcccggggccccggctggccagaggatggacgaggaggaggatggagcgggcgcagaggagtcgggacagccccggagcttcatgcggctcaacgacctgtcgggggccgggggccggcgggggccggggtcagcagaaaaggacccgggcagcgcggactccgaggcggagggactgccgtacccggcgctggccccggtggttttcttctacttgagccaggacagccgcccgcggagctggtgtctccgcacggtctgtaacccctggtttgagcgtatcagcatgttggtcatccttctcaactgcgtgaccctgggcatgttccggccgtgcgaggacatcgcctgtgactcccagcgctgccggatcctgcaggcctttgatgacttcatctttgccttcttcgccgtggagatggtggtgaagatggtggccttgggcatctttgggaaaaagtgttacctgggagacacttggaaccggcttgactttttcatcgtcattgcagggatgttggagtactcgctggacctgcagaacgtcagcttctcagctgtcaggacagtccgtgtgctgcgaccgctcagggccattaaccgggtgcccagcatgcgcatccttgtcacgttgttgctggacacactgcccatgctgggcaacgtcctgctgctctgcttcttcgtcttcttcatctttggcatcgtcggcgtccagctgtgggcagggctgcttcggaatcgatgcttcctacctgagaattttagcctccccctaagcgtggacctggagcgctattaccagacagagaatgaggatgagagccccttcatctgctcccagccacgcgagaacggcatgcggtcctgcagaagcgtgcccacgttgcgtggggaggggggcggtggcccaccttgtggtctggactatgaggcctacaacagctccagcaataccacctgtgtcaactggaaccagtactataccaactgctcagcgggggagcacaaccccttcaagggcgccatcaactttgacaacattggctatgcctggatcgccatcttccaggtcatcacactggagggctgggtcgacatcatgtactttgtgatggatgctcattccttctacaatttcatctacttcatcctcctcatcatcgtgggctccttcttcatgatcaacctgtgcctggtggtgattgccacgcagttctcagagaccaagcagagggaaagccagctgatgcgggagcagcgtgtgcggttcctgtccaacgccagcaccctggctagcttctctgagcccggcagctgctatgaggagctgctcaagtacctggtgtacatccttcgtaaggcagcccgcaggctggctcaggtctctcgggcagcaggtgtgcgggctgggctgctcagcagcccagcaccccttgggggccaggagacccagcccagcagcagctgctctcgctctcaccgccgcctgtccgtccaccacctggtgcaccaccaccaccaccatcaccaccactaccacctgggcaatggaacgctcagggtcccccgggccagcccagagatccaggacagggatgccaatgggtcccgccggctcatgctgccaccaccctcgacgcctgccgtctccgggggccccccaggtggcgcagagtctgtgcacagcttctaccatgccgactgccacttagagccagtccgctgccaggcaccccctcccaggtccccatctgaggcatccggcaggactgtgggcagcgggaaggtgtatcccaccgtgcacaccagccctccaccggagacgctgaaagagaaggcactagtagaggtggctgccagctctgggcccgcaaccctcaccagcctcaacatcccacctgggccctacagctccatgcacaagctgctggagacacagagtacaggtgcctgccaaagctcttgcaagatctccagcccttgcttgaaggcagacagtggagcctctggtccagacagctgcccctactgtgcccgggcgggggcaggggaggtagagctcgccgaccgtgaaatgcctgactcagacagcgaggcggtttatgagttcacacaggatgcccagcacagtgacctccgggacccccacagccggcggcaacggagcctgggcccagatgcagagcccagctctgtgctggccttctggaggctaatctgtgacaccttccgaaagattgtggacagcaagtactttggccggggaatcatgattgccatcctggtcaatacactcagcatgggcatcgaataccatgagcagcccgaggagcttaccaacgccctagaaatcagcaacatcgtcttcaccagcctctttgccctggagatgctgctgaagctgctcgtgtatggtccctttggctacatcaagaatccctacaacatcttcgacggtgtcattgtggtcatcagcgtgtgggagatcgtgggccagcaggggggcggcctgtcggtgctgcggaccttccgcctgatgcgcgtgctgaagctggtgcgcttcctgccggcgctgcagcggcagctggtggtgctcatgaagaccatggacaacgtggccaccttctgcatgctgctcatgctcttcatcttcatcttcagcatcctgggcatgcatctcttcggctgcaagtttgcctccgagcgggatggggacaccctgccagaccggaagaattttgactccttgctctgggccatcgtcactgtctttcagatcctcacccaggaggactggaacaaagtcctgtacaatggtatggcctccacgtcatcctgggcagccctttacttcattgccctcatgaccttcggcaactacgtgctcttcaatttgctggtcgctattctggtggagggcttccaggcggaggaaatcagcaaacgggaagatgcgagtggacagttaagctgtattcagctgcctgtcgactcccaggggggagatgccaacaagtccgaatcagagcccgatttcttctcacccagcctggatggtgatggggacaggaagaagtgcttggccttggtgtccctgggagagcatccggagctgcggaagagcctgctgccgcctctcatcatccacacggccgccacacccatgtcgctgcccaagagcaccagcacgggcctgggcgaggcgctgggccccatgtcgcgccgcaccagcagcagcgggtcggcggagcccggggcggcccacgagatgaagtcgccgcccagtgcccgcagctccccgcacagcccctggagcgctgcaagcagctggaccagcaggcgctccagccggaacagcctcggccgtgcccccagcctgaagcggagaagcccaagtggggagcggcggtccctgttgtcaggagaaggccaggagagccaggatgaggaggagagctcagaagaggagcgggccagccctgcgggcagcgaccgtcgccacagggagtccctggagcgggaggccaagagttcctttgacctgccagacacactgcaggtgccagggctgcaccgcactgccagtggccgaggctctgcttctgagcaccaggactgcaatggcaagtcggcttcggggcgtctggcccgggccctgcggcccgacgaccccccactggatggggatgacgcggatgacgagggcaacctgagcaaaggggaacgggtccgcgcgtggatccgagcccgactccctgcctgctgccttgagcgagactcctggtcagcctacatcttccctcctcagtccaggttccgcctcctgtgtcaccggatcatcacccacaagatgtttgaccacgtggtcctcgtcatcatcttccttaactgcatcaccatcgccatggagcgccccaaaattgacccccacagcgctgaacgcatcttcctgaccctctccaattacatcttcaccgcagtctttctggctgaaatgacagtgaaggtggtggcgctgggctggtgcttcggggagcaggcgtacctgcgcagcagctggaacgtgctggacgggctgttggtgctcatctccgtcatcgacattctggtgtccatggtctctgacagcggcaccaagatcctgggcatgctgagggtgctgcggctgctgcggaccctgcgcccgctcagggtgatcagccgggcgcaggggctgaagctggtggtggagacgctgatgtcctcactgaaacccatcggcaacattgtagtcatctgctgtgccttcttcatcattttcggcatcttgggggtgcagctcttcaaagggaagtttttcgtgtgccagggcgaggataccaggaacatcaccaataaatcggactgtgctgaggccagttaccggtgggtccggcacaagtacaactttgacaaccttggccaggccctgatgtccctgttcgttttggcctccaaggacggctgggtggacatcatgtatgatgggctggatgctgtgggcgtggaccagcagcccatcatgaaccacaacccctggatgctgctgtacttcatctcgttcctgctcattgtggccttctttgtcctgaacatgtttgtgggtgtggtggtggagaacttccacaagtgtcggcagcaccaggaggaagaggaggcccggcggcgggaggagaagcgtctacgaagactggagaaaaagagaaggaatctaatgctggacgatgtaattgcttccggcagctcagccagcgctgcgtcagaagcccagtgcaaaccttactactccgactactcccgcttccggctcctcgtccaccacttgtgcaccagccactacctggatctcttcatcacaggtgtcatcgggttgaacgtggtcaccatggccatggagcactaccagcagccccagattctggatgaagctctgaagatctgcaactacatcttcactgtcatctttgttttggagtcagttttcaaacttgtggcctttggtttccgtcggttcttccaggacaggtggaaccagctggacctggccattgtgctgctgtccatcatgggcatcacgctggaggaaatcgaggtcaacgcctcactgcccatcaaccccaccatcatccgcatcatgagggtactgcgcattgcccgagtgctgaagctgctgaagatggctgtgggcatgcgggcgctgctggacacggtgatgcaggccctgccccaggtggggaacctgggacttctcttcatgttgttgtttttcatctttgcagctctgggcgtggagctctttggagacctggagtgtgacgagacacacccctgtgagggcctgggccggcatgccacctttcggaactttggcatggccttcctaaccctcttccgagtctccacaggtgacaactggaacggcattatgaaggacaccctccgggactgtgaccaggagtccacctgctacaacacggtcatctcgcccatctactttgtgtccttcgtgctgacggcccagtttgtgctggtcaacgtggtgatcgctgtgctgatgaagcacctggaggagagcaacaaggaggccaaggaggaggctgagctggaggctgagctggagctagagatgaagaccctcagcccccagccccactcgccgctgggcagccccttcctctggcctggggtcgagggccccgacagccccgacagccccaagcctggggccctgcacccagcggcccatgcgagatcagcctcccacttttccctggagcaccccacggacgggcagctgtttgacaccatatccctgctgatccagggctccctggagtgggagctgaagctgatggacgagctggcaggcccaggtggccagccctctgccttcccttctgcccccagcctgggcggctccgacccacagatccctctagctgagatggaggctctgtctctgacgtcagagattgtgtctgaaccgtcctgctctctagctctgacggatgactctttgcctgatgacatgcacacactcttacttagtgccccggagagcaatgtacagccccaccccacggagctgccaggaccagacttactgaccgtgcggaagtctggggtcagccgaacgcactctctgcccaatgacagctacatgtgtcggcatgggagcattgccgaggggcccctgggacagaggggctgggggctccccaaagctcagtcaggctccgtcttgtccgttcactcccagccagcagacaccagctacatcctgcagcttcccaaagatgcacctcatctgcttcagccctacagcaccccaacctggggcaccatccccaaactgcccccaccaggacgctcccctttggctcaaaggccactcaggcgccaggcagcaataaggactgactccttggacgttcagggcctgggcagccgggaagacctgctggcagaggtgagtgggccctccctgcccctggcccgggcctactctttctggggccagtcgagcacccaggcgcagcagcactcccgcagccacagcaacatctccaagcacatgcccccgcgagccccttgcccaggcccacaacccaactgggacaagggccctccagagaccagaagcagcttagagttggacacggagctgagctggatttcaggagacctcctgccccctggcggccaggaggagcccccatccccacgggacctgaagaagtgctacagcgtggaggcccagagctgccagcgccggcccacgtcctggctggatgagcagaggagacactctatcgccgtcagctgcctggacagtggctcccaaccccacctgggcacagacccctctaaccttgggggccagcctcttggggggcctgggagccgacccaagaaaaaactcagcccgcccagtatctccatagacccccccgagagccaaggccctcggcccccgcccagccctggcgtctgcctccggaggagggctccatccagcgactccaaggatcccttggcctccggcccccctgacagcatggctgcctcgccctccccaaagaaagatgtgctgagtctctccggtttatcctctgacccggcagacctggacccctgagtcctgccccactttcccactcacctttctccactgggtgccaagtcctagctcctcctcctgggctatattcctgacaaaagttccatatagacaccaaggaggcggaggcgctcctccctgcctcagtggctctgggtacctgcaagcagaacttccaaagagagttaaaagcagcagccctggcaactctggctccaggcagaaggagaggcccggtgcagctgaggttcccaacaccaggagctgttgggagaaagcaatacgtctgtgcagaatctctatgtatattctattttattaaattaattgaatctagtatatgcgggatgtacgacattttgtgactgaagagacttgtttccttctacttttatgtgtctcagaatatttttgaggcgaaggcgtctgtctcttggctattttaacctaaaataacagtctagttataatccctcttcttgcaaagcacaagctgggaccgcgagcgcattgcagccccaacggtggcccatcttcagcggagagcgagaaccattttggaaactgtaatgtaacttattttctcctttaacctcgtcatcattttctgtagggaaaaaaaaagaaaaagaaaaaatgagattttacaaatgaaatggaatctttttatatatacatacatacatatctatatatatatatataaaataaagtaattttcctaaataaaaagctaatcacggtccagagtaaaagcaaaagggatggagagttaggcacgtccagatggcactgatgagagagagatcctggagatggggagtgggcggtggggagggaagcttcagggctgcctctttgtgtatgagtgtgtatgtgtttgtgtatatgagtgtgtgtgtatatgagtgtgagtgtgtgcgtgtctgagagtgagagaacctgaaccctttgctctggaaggctgcacctctagcccgccctccccagctgtgaaggagaggagaagcccctccgcctggtgcaggctggggaggcagggtctcctctgctgctatcaaagctttactgcttcctctagctaggcagctcagtgaatgggagtaattccagattaactcttatttctgctgacagctatcagccgcacattgaaagctggaaattggcataatgaagctgttttggttaatggggccgactgaggctgggggaggttgcctcagaggctgcagatctggatctgtgggttggtgggggaggggggaagtgtttctgggttttccttcctgaagcttcagcacagatttgccacacttctggctggatgcgtgacctgagctgcctggacttcagcctcctgcccttgggggtgggcttagctgactggcattacaggcactgcccgatggggacctcatccacctgcccgcaatggaattaagctgtgtaaatggactgggctgcccttcctgaggatgagggtccagggctgggcgtccagaggcaaccttctggtggaggtggtagggtcggaggccaggctgcaggctgctgagtggggagctggccccctgggtggtgatgagcgagcgctcaagatgtttacatgcactgctgctgctgcctgcccagggggagcccgtggagaagggaggtttgaaggtggtcagggacagacaggcgggaagagggggagtggcgtggcccaggccacctgtctggtgctactgcagacaatattctcttgtctgaaatcttggtgccaagaggtggcgaccatgggtccaggcagcctgtcacctagccactcccaaacatctgtcccaaccccactcccttgaacagccctatcccctcgcccccaaggccttcaaaccccaggagtggattgggttcttgaaacctcactggcaatgctcgttcacgcactgtctgacctggtcagctgggaactgggagcaccaggctgccgggcgagtggacctggaggcgctgtccagccttgtgttttctaagctgggtgagagctttcctcattgctcttttggagagaactgataccagtccttgaagccaatgcttggttttctccttttagggtgtgcaataatgtcagactttttcctctggcctccttgggtggggagagggagcgcttgtaggagctgccatttaagattt

SEQ ID NO: 28 - RNA, 10040 nt, Macaca mulatta
  source 1..10040: mol_type = mRNA
aaatcttaaatggcagctcctacaagcgctccctctccccacccaaggaggccagaggaaaaagtctgacattattgcacaccctaaaaggagaaaaccaagcattggcttcaaggactggtatcagttctctccaaaagagcaatgaggaaagctctcacccagcttagaaaacacaaggctggacagcgcctccaggtccactcgcccggcagcctggtgctcccagttcccagctgaccaggtcagacagtgcgtgaacgagcattgccagtgaggtttcaagaacccaatccactcctggggtttgaaggccttgggggcgaggggatagggctgttcaagggagtggggttgggacagatgtttgggagtggctaggtgacaggctgcctggacccatggtcgccacctcttggcaccaagatttcagacaagagaatattgtctgcagtagcaccagacaggtggcctgggccacgccactccccctcttcccgcctgtctgtccctgaccaccttcaaacctcccttctccacgggctccccctgggcaggcagcagcagcagtgcatgtaaacatcttgagcgctcgctcatcaccacccagggggccagctccccactcagcagcctgcagcctggcctccgaccctaccacctccaccagaaggttgcctctggacgcccagccctggaccctcatcctcaggaagggcagcccagtccatttacacagcttaattccattgcgggcaggtggatgaggtccccatcgggcagtgcctgtaatgccagtcagctaagcccacccccaagggcaggaggctgaagtccaggcagctcaggtcacgcatccagccagaagtgtggcaaatctgtgctgaagcttcaggaaggaaaacccagaaacacttcccccctcccccaccaacccacagatccagatctgcagcctctgaggcaacctcccccagcctcagtcggccccattaaccaaaacagcttcattatgccaatttccagctttcaatgtgcggctgatagctgtcagcagaaataagagttaatctggaattactcccattcactgagctgcctagctagaggaagcagtaaagctttgatagcagcagaggagaccctgcctccccagcctgcaccaggcggaggggcttctcctctccttcacagctggggagggcgggctagaggtgcagccttccagagcaaagggttcaggttctctcactctcagacacgcacacactcacactcatatacacacacactcatatacacaaacacatacacactcatacacaaagaggcagccctgaagcttccctccccaccgcccactccccatctccaggatctctctctcatcagtgccatctggacgtgcctaactctccatcccttttgcttttactctggaccgtgattagctttttatttaggaaaattactttattttatatatatatatatagatatgtatgtatgtatatataaaaagattccatttcatttgtaaaatctcattttttctttttctttttttttccctacagaaaatgatgacgaggttaaaggagaaaataagttacattacagtttccaaaatggttctcgctctccgctgaagatgggccaccgttggggctgcaatgcgctcgcggtcccagcttgtgctttgcaagaagagggattataactagactgttattttaggttaaaatagccaagagacagacgccttcgcctcaaaaatattctgagacacataaaagtagaaggaaacaagtctcttcagtcacaaaatgtcgtacatcccgcatatactagattcaattaatttaataaaatagaatatacatagagattctgcacagacgtattgctttctcccaacagctcctggtgttgggaacctcagctgcaccgggcctctccttctgcctggagccagagttgccagggctgctgcttttaactctctttggaagttctgcttgcaggtacccagagccactgaggcagggaggagcgcctccgcctccttggtgtctatatggaacttttgtcaggaatatagcccaggaggaggagctaggacttggcacccagtggagaaaggtgagtgggaaagtggggcaggactcaggggtccaggtctgccgggtcagaggataaaccggagagactcagcacatctttctttggggagggcgaggcagccatgctgtcaggggggccggaggccaagggatccttggagtcgctggatggagccctcctccggaggcagacgccagggctgggcgggggccgagggccttggctctcgggggggtctatggagatactgggcgggctgagttttttcttgggtcggctcccaggccccccaagaggctggcccccaaggttagaggggtctgtgcccaggtggggttgggagccactgtccaggcagctgacggcgatagagtgtctcctctgctcatccagccaggacgtgggccggcgctggcagctctgggcctccacgctgtagcacttcttcaggtcccgtggggatgggggctcctcctggccgccagggggcaggaggtctcctgaaatccagctcagctccgtgtccaactctaagctgcttctggtctctggagggcccttgtcccagttgggttgtgggcctgggcaaggggctcgcgggggcatgtgcttggagatgttgctgtggctgcgggagtgctgctgcgcctgggtgctcgactggccccagaaagagtaggcccgggccaggggcagggagggcccactcacctctgccagcaggtcttcccggctgcccaggccctgaacgtccaaggagtcagtccttattgctgcctggcgcctgagtggcctttgagccaaaggggagcgtcctggtgggggcagtttggggatggtgccccaggttggggtgctgtagggctgaagcagatgaggtgcatctttgggaagctgcaggatgtagctggtgtctgctggctgggagtgaacggacaagacggagcctgactgagctttggggagcccccagcccctctgtcccaggggcccctcggcaatgctcccatgccgacacatgtagctgtcattgggcagagagtgcgttcggctgaccccagacttccgcacggtcagtaagtctggtcctggcagctccgtggggtggggctgtacattgctctccggggcactaagtaagagtgtgtgcatgtcatcaggcaaagagtcatccgtcagagctagagagcaggacggttcagacacaatctctgacgtcagagacagagcctccatctcagctagagggatctgtgggtcggagccgcccaggctgggggcagaagggaaggcagagggctggccacctgggcctgccagctcgtccatcagcttcagctcccactccagggagccctggatcagcagggatatggtgtcaaacagctgcccgtccgtggggtgctccagggaaaagtgggaggctgatctcgcatgggccgctgggtgcagggccccaggcttggggctgtcggggctgtcggggccctcgaccccaggccagaggaaggggctgcccagcggcgagtggggctgggggctgagggtcttcatctctagctccagctcagcctccagctcagcctcctccttggcctccttgttgctctcctccaggtgcttcatcagcacagcgatcaccacgttgaccagcacaaactgggccgtcagcacgaaggacacaaagtagatgggcgagatgaccgtgttgtagcaggtggactcctggtcacagtcccggagggtgtccttcataatgccgttccagttgtcacctgtggagactcggaagagggttaggaaggccatgccaaagttccgaaaggtggcatgccggcccaggccctcacaggggtgtgtctcgtcacactccaggtctccaaagagctccacgcccagagctgcaaagatgaaaaacaacaacatgaagagaagtcccaggttccccacctggggcagggcctgcatcaccgtgtccagcagcgcccgcatgcccacagccatcttcagcagcttcagcactcgggcaatgcgcagtaccctcatgatgcggatgatggtggggttgatgggcagtgaggcgttgacctcgatttcctccagcgtgatgcccatgatggacagcagcacaatggccaggtccagctggttccacctgtcctggaagaaccgacggaaaccaaaggccacaagtttgaaaactgactccaaaacaaagatgacagtgaagatgtagttgcagatcttcagagcttcatccagaatctggggctgctggtagtgctccatggccatggtgaccacgttcaacccgatgacacctgtgatgaagagatccaggtagtggctggtgcacaagtggtggacgaggagccggaagcgggagtagtcggagtagtaaggtttgcactgggcttctgacgcagcgctggctgagctgccggaagcaattacatcgtccagcattagattccttctctttttctccagtcttcgtagacgcttctcctcccgccgccgggcctcctcttcctcctggtgctgccgacacttgtggaagttctccaccaccacacccacaaacatgttcaggacaaagaaggccacaatgagcaggaacgagatgaagtacagcagcatccaggggttgtggttcatgatgggctgctggtccacgcccacagcatccagcccatcatacatgatgtccacccagccgtccttggaggccaaaacgaacagggacatcagggcctggccaaggttgtcaaagttgtacttgtgccggacccaccggtaactggcctcagcacagtccgatttattggtgatgttcctggtatcctcgccctggcacacgaaaaacttccctttgaagagctgcacccccaagatgccgaaaatgatgaagaaggcacagcagatgactacaatgttgccgatgggtttcagtgaggacatcagcgtctccaccaccagcttcagcccctgcgcccggctgatcaccctgagcgggcgcagggtccgcagcagccgcagcaccctcagcatgcccaggatcttggtgccgctgtcagagaccatggacaccagaatgtcgatgacggagatgagcaccaacagcccgtccagcacgttccagctgctgcgcaggtacgcctgctccccgaagcaccagcccagcgccaccaccttcactgtcatttcagccagaaagactgcggtgaagatgtaattggagagggtcaggaagatgcgttcagcgctgtgggggtcaattttggggcgctccatggcgatggtgatgcagttaaggaagatgatgacgaggaccacgtggtcaaacatcttgtgggtgatgatccggtgacacaggaggcggaacctggactgaggagggaagatgtaggctgaccaggagtctcgctcaaggcagcaggcagggagtcgggctcggatccacgcgcggacccgttcccctttgctcaggttgccctcgtcatccgcgtcatccccatccagtggggggtcgtcgggccgcagggcccgggccagacgccccgaagccgacttgccattgcagtcctggtgctcagaagcagagcctcggccactggcagtgcggtgcagccctggcacctgcagtgtgtctggcaggtcaaaggaactcttggcctcccgctccagggactccctgtggcgacggtcgctgcccgcagggctggcccgctcctcttctgagctctcctcctcatcctggctctcctggccttctcctgacaacagggaccgccgctccccacttgggcttctccgcttcaggctgggggcacggccgaggctgttccggctggagcgcctgctggtccagctgcttgcagcgctccaggggctgtgcggggagctgcgggcactgggcggcgacttcatctcgtgggccgccccgggctccgccgacccgctgctgctggtgcggcgcgacatggggcccagcgcctcgcccaggcccgtgctggtgctcttgggcagcgacatgggtgtggcggccgtgtggatgatgagaggcggcagcaggctcttccgcagctccggatgctctcccagggacaccaaggccaagcacttcttcctgtccccatcaccatccaggctgggtgagaagaaatcgggctctgattcggacttgttggcatctcccccctgggagtcgacaggcagctgaatacagcttaactgtccactcgcatcttcccgtttgctgatttcctccgcctggaagccctccaccagaatagcgaccagcaaattgaagagcacgtagttgccgaaggtcatgagggcaatgaagtaaagggctgcccaggatgacgtggaggccataccattgtacaggactttgttccagtcctcctgggtgaggatctgaaagacagtgacgatggcccagagcaaggagtcaaaattcttccggtctggcagggtgtccccatcccgctcggaggcaaacttgcagccgaagagatgcatgcccaggatgctgaagatgaagatgaagagcatgagcagcatgcagaaggtggccacgttgtccatggtcttcatgagcaccaccagctgccgctgcagcgccggcaggaagcgcaccagcttcagcacgcgcatcaggcggaaggtccgcagcaccgacaggccgcccccctgctggcccacgatctcccacacgctgatgaccacaatgacaccgtcgaagatgttgtagggattcttgatgtagccaaagggaccatacacgagcagcttcagcagcatctccagggcaaagaggctggtgaagacgatgttgctgatttctagggcgttggtaagctcctcgggctgctcatggtattcgatgcccatgctgagtgtattgaccaggatggcaatcatgattccccggccaaagtacttgctgtccacaatctttcggaaggtgtcacagattagcctccagaaggccagcacagagctgggctctgcatctgggcccaggctccgttgccgccggctgtgggggtcccggaggtcactgtgctgggcatcctgtgtgaactcataaaccgcctcgctgtctgagtcaggcatttcacggtcggcgagctctacctcccctgcccccgcccgggcacagtaggggcagctgtctggaccagaggctccactgtctgccttcaagcaagggctggagatcttgcaagagctttggcaggcacctgtactctgtgtctccagcagcttgtgcatggagctgtagggcccaggtgggatgttgaggctggtgagggttgcgggcccagagctggcagccacctctactagtgccttctctttcagcgtctccggtggagggctggtgtgcacggtgggatacaccttcccgctgcccacagtcctgccggatgcctcagatggggacctgggagggggtgcctggcagcggactggctctaagtggcagtcggcatggtagaagctgtgcacagactctgcgccacctggggggcccccggagacggcaggcgtcgagggtggtggcagcatgagccggcgggacccattggcatccctgtcctggatctctgggctggcccgggggaccctgagcgttccattgcccaggtggtagtggtggtgatggtggtggtggtggtgcaccaggtggtggacggacaggcggcggtgagagcgagagcagctgctgctgggctgggtctcctggcccccaaggggtgctgggctgctgagcagcccagcccgcacacctgctgcccgagagacctgagccagcctgcgggctgccttacgaaggatgtacaccaggtacttgagcagctcctcatagcagctgccgggctcagagaagctagccagggtgctggcgttggacaggaaccgcacacgctgctcccgcatcagctggctttccctctgcttggtctctgagaactgcgtggcaatcaccaccaggcacaggttgatcatgaagaaggagcccacgatgatgaggaggatgaagtagatgaaattgtagaaggaatgagcatccatcacaaagtacatgatgtcgacccagccctccagtgtgatgacctggaagatggcgatccaggcatagccaatgttgtcaaagttgatggcgcccttgaaggggttgtgctcccccgctgagcagttggtatagtactggttccagttgacacaggtggtattgctggagctgttgtaggcctcatagtccagaccacaaggtgggccaccgcccccctccccacgcaacgtgggcacgcttctgcaggaccgcatgccgttctcgcgtggctgggagcagatgaaggggctctcatcctcattctctgtctggtaatagcgctccaggtccacgcttagggggaggctaaaattctcaggtaggaagcatcgattccgaagcagccctgcccacagctggacgccgacgatgccaaagatgaagaagacgaagaagcagagcagcaggacgttgcccagcatgggcagtgtgtccagcaacaacgtgacaaggatgcgcatgctgggcacccggttaatggccctgagcggtcgcagcacacggactgtcctgacagctgagaagctgacgttctgcaggtccagcgagtactccaacatccctgcaatgacgatgaaaaagtcaagccggttccaagtgtctcccaggtaacactttttcccaaagatgcccaaggccaccatcttcaccaccatctccacggcgaagaaggcaaagatgaagtcatcaaaggcctgcaggatccggcagcgctgggagtcacaggcgatgtcctcgcacggccggaacatgcccagggtcacgcagttgagaaggatgaccaacatgctgatacgctcaaaccaggggttacagaccgtgcggagacaccagctccgcgggcggctgtcctggctcaagtagaagaaaaccaccggggccagcgccgggtacggcagtccctccgcctcggagtccgcgctgcccgggtccttttctgctgaccccggcccccgccggcccccggcccccgacaggtcgttgagccgcatgaagctccggggctgtcccgactcctctgcgcccgctccatcctcctcctcgtccatcctctggccagccggggccccgggcggtccggagaggggcaagcggcgcccctccgaggagatgtcctcacgcaacccgggagccccggcgggggcacatctggggggctctagggcgcaagctgagcccccgggagggccagttcagtccagctccccctgcccgcaggggcatgctgcccgcggggcgccggggcgcagggaaaccccgcccggcgcaagtcccgcttcccctgcgcccctggggctccccgggccagccggccggctccccctcactttgttccggcttcttcgcttcgcgcccaggctccggttgccggattcggcgctaccttcggcgaagcggccccgagagggcgagcgaaaaggggggcagcggcgaagggcgggggtccggggaggggcgccccctcttcccgcggcgcagctggagccggatctaaggggtcagcatcgtcccggctccgcgccaggcggcgggggaggggaggagggatctctttaggggtgggcttggagggggtgggggcggctccttcccccgccccgcggcgggctcacggtccgggaggggcggggagacggtggggggcagtcccgggcgggagtggaggcggagatgccgccgccgcagccgccgcggtggctgccgctgccgtagctgtcgccggcgccactgcctcctcctccggccgagacgcggagcgagcgagcgaaagcggcggcgaggagcccgg

SEQ ID NO: 29 - RNA, 8299 nt, Macaca fascicularis
  source 1..8299: mol_type = mRNA
cgccgccgctttcgctcgctcgctccgcgtctcggccggaggaggaggcagtggcgccggcgacagctacggcagcggcagccaccgcggcggctgcggcggcggcatctccgcctccactcccgcccgggactgccccccaccgtctccccgcccctcccggaccgtgagcccgccgcggggcgggggaaggagccgcccccaccccctccaagcccacccctaaagagatccctcctcccctcccccgccgcctggcgcggagccgggacgatgctgaccccttagatccggctccagctgcgccgcgggaagagggggcgcccctccccggacccccgcccttcgccgctgccccccttttcgctcgccctctcggggccgcttcgccgaaggtagcgccgaatccggcaaccggagcctgggcgcgaagcgaagaagccggaacaaagtgagggggagccggccggctggcccggggagccccaggggcgcaggggaagcgggacttgcgccgggcggggtttccctgcgccccggcgccccgcgggcagcatgcccctgcgggcagggggagctggactgaactggccctcccgggggctcagcttgcgccctagagccccccagatgtgcccccgccggggctcccgggttgcgtgaggacatctcctcggaggggcgccgcttgcccctctccggaccgcccggggccccggctggccagaggatggacgaggaggaggatggagcgggcgcagaggagtcgggacagccccggagcttcatgcggctcaacgacctgtcgggggccgggggccggcgggggccggggtcagcagaaaaggacccgggcagcgcggactccgaggcggagggactgccgtacccggcgctggccccggtggttttcttctacttgagccaggacagccgcccgcggagctggtgtctccgcacggtctgtaacccctggtttgagcgtatcagcatgttggtcatccttctcaactgcgtgaccctgggcatgttccggccgtgcgaggacatcgcctgtgactcccagcgctgccggatcctgcaggcctttgatgacttcatctttgccttcttcgccgtggagatggtggtgaagatggtggccttgggcatctttgggaaaaagtgttacctgggagacacttggaaccggcttgactttttcatcgtcattgcagggatgttggagtactcgctggacctgcagaacgtcagcttctcagctgtcaggacagtccgtgtgctgcgaccgctcagggccattaaccgggtgcccagcatgcgcatccttgtcacgttgttgctggacacactgcccatgctgggcaacgtcctgctgctctgcttcttcgtcttcttcatctttggcatcgtcggcgtccagctgtgggcagggctgcttcggaatcgatgcttcctacctgagaattttagcctccccctaagcgtggacctggagcgctattaccagacagagaatgaggatgagagccccttcatctgctcccagccacgcgagaacggcatgcggtcctgcagaagcgtgcccacgttgcgtggggaggggggcggtggcccaccttgtggtctggactatgaggcctacaacagctccagcaataccacctgtgtcaactggaaccagtactacaccaactgctcagcgggggagcacaaccccttcaagggcgccatcaactttgacaacattggctatgcctggatcgccatcttccaggtcatcacactggagggctgggtcgacatcatgtactttgtgatggatgctcattccttctacaatttcatctacttcatcctcctcatcatcgtgggctccttcttcatgatcaacctgtgcctggtggtgattgccacgcagttctcagagaccaagcagagggaaagccagctgatgcgggagcagcgtgtgcggttcctgtccaacgccagcaccctggctagcttctctgagcccggcagctgctatgaggagctgctcaagtacctggtgtacatccttcgtaaggcagcccgcaggctggctcaggtctctcgggcagcaggtgtgcgggctgggctgctcagcagcccagcaccccttgggggccaggagacccagcccagcagcagctgctctcgctctcaccgccgcctgtccgtccaccacctggtgcaccaccaccaccaccatcaccaccactaccacctgggcaatggaacgctcagggtcccccgggccagcccagagatccaggacagggatgccaatgggtcccgccggctcatgctgccaccaccctcgacgcctgccctctccgggggccccccaggtggcgcagagtctgtgcacagcttctaccatgccgactgccacttagagccagtccgctgccaggcaccccctcccaggtccccatctgaggcatccggcaggactgtgggcagcgggaaggtgtatcccaccgtgcacaccagccctccaccggagacgctgaaagagaaggcactagtagaggtggctgccagctctgggcccacaaccctcaccagcctcaacatcccacctgggccctacagctccatgcacaagctgctggagacacagagtacaggtgcctgccaaagctcttgcaagatctccagcccttgcttgaaggcagacagtggagcctctggtccagacagctgcccctactgtgcccgggcgggggcaggggaggtagagctcgccgaccgtgaaatgcctgactcagacagcgaggcggtttatgagttcacacaggatgcccagcacagtgacctccgggacccccacagccggcggcaacggagcctgggcccagatgcagagcccagctctgtgctggccttctggaggctaatctgtgacaccttccgaaagattgtggacagcaagtactttggccggggaatcatgattgccatcctggtcaatacactcagcatgggcatcgaataccatgagcagcccgaggagcttaccaacgccctagaaatcagcaacatcgtcttcaccagcctctttgccctggagatgctgctgaagctgctcgtgtatggtccctttggctacatcaagaatccctacaacatcttcgacggtgtcattgtggtcatcagcgtgtgggagatcgtgggccagcaggggggcggcctgtcggtgctgcggaccttccgcctgatgcgcgtgctgaagctggtgcgcttcctgccggcgctgcagcggcagctggtggtgctcatgaagaccatggacaacgtggccaccttctgcatgctgctcatgctcttcatcttcatcttcagcatcctgggcatgcatctcttcggctgcaagtttgcctccgagcgggatggggacaccctgccagaccggaagaattttgactccttgctctgggccatcgtcactgtctttcagatcctcacccaggaggactggaacaaagtcctgtacaatggtatggcctccacgtcatcctgggcagccctttacttcattgccctcatgaccttcggcaactacgtgctcttcaatttgctggtcgctattctggtggagggcttccaggcggaggaaatcagcaaacgggaagatgcgagtggacagttaagctgtattcagctgcctgtcgactcccaggggggagatgccaacaagtccgaatcagagcccgatttcttctcacccagcctggatggtgatggggacaggaagaagtgcttggccttggtgtccctgggagagcatccggagctgcggaagagcctgctgccgcctctcatcatccacacggccgccacacccatgtcgctgcccaagagcaccagcacgggcctgggcgaggcgctgggccccatgtcgcgccgcaccagcagcagcgggtcggcggagcccggggcggcccacgagatgaagtcaccgcccagtgctcgcagctccccgcacagcccctggagcgctgcaagcagctggaccagcaggcgctccagccggaacagcctcggccgtgcccccagcctgaagcggagaagcccaagtggggagcggcggtccctgttgtcaggagaaggccaggagagccaggatgaggaggagagctcagaagaggagcgggccagccccgcgggcagcgaccgtcgccacagggagtccctggagcgggaggccaagagttcctttgacctgccagacacactgcaggtgccagggctgcaccgcactgccagtggccgaggctctgcttctgagcaccaggactgcaatggcaagtcggcttcggggcgtctggcccgggccctgcggcccgacgaccccccactggatggggatgacgcggatgacgagggcaacctgagcaaaggggaacgggtccgtgcgtggatccgagcccgactccctgcctgctgcctcgagcgagactcctggtcagcctacatcttccctcctcagtccaggttccgcctcctgtgtcaccgcatcatcacccacaagatgtttgaccacgtggtcctcgtcatcatcttccttaactgcatcaccatcgccatggagcgccccaaaattgacccccacagcgctgaacgcatcttcctgaccctctccaattacatcttcaccgcagtctttctggctgaaatgacagtgaaggtggtggcactgggctggtgcttcggggagcaggcgtacctgcgcagcagctggaacgtgctggacgggctgttggtgctcatctccgtcatcgacattctggtgtccatggtctctgacagcggcaccaagatcctgggcatgctgagggtgctgcggctgctgcggaccctgcgcccgctcagggtgatcagccgggcgcaggggctgaagctggtggtggagacgctgatgtcctcactgaaacccatcggcaacattgtagtcatctgctgtgccttcttcatcattttcggcatcttgggggtgcagctcttcaaagggaagtttttcgtgtgccagggcgaggataccaggaacatcaccaataaatcggactgtgctgaggccagttaccggtgggtccggcacaagtacaactttgacaaccttggccaggctctgatgtccctgttcgttttggcctccaaggacggctgggtggacatcatgtatgatgggctggatgctgtgggcgtggaccagcagcccatcatgaaccacaacccctggatgctgctgtacttcatctcgttcctgctcattgtggccttctttgtcctgaacatgtttgtgggtgtggtggtggagaacttccacaagtgtcggcagcaccaggaggaagaggaggcccggcggcgggaggagaagcgtctacgaagactggagaaaaagagaaggaatctaatgctggacgatgtaattgcttccggcagctcagccagcgctgcgtcagaagcccagtgcaaaccttactactccgactactcccgcttccggctcctcgtccaccacttgtgcaccagccactacctggatctcttcatcacaggtgtcatcgggttgaacgtggtcaccatggccatggagcactaccagcagccccagattctggatgaagctctgaagatctgcaactacatcttcactgtcatctttgttttggagtcagttttcaaacttgtggcctttggtttccgtcggttcttccaggacaggtggaaccagctggacctggccattgtgctgctgtccatcatgggcatcacgctggaggaaatcgaggtcaacgcctcactgcccatcaaccccaccatcatccgcatcatgagggtactgcgcattgcccgagtgctgaagctgctgaagatggctgtgggcatgcgggcgctgctggacacggtgatgcaggccctgccccaggtggggaacctgggacttctcttcatgttgttgtttttcatctttgcagctctgggcgtggagctctttggagacctggagtgtgacgagacacacccctgtgagggcctgggccggcatgccacctttcggaactttggcatggccttcctaaccctcttccgagtctccacaggcgacaactggaacggcattatgaaggacaccctccgggactgtgaccaggagtccacctgctacaacacggtcatctcgcccatctactttgtgtccttcgtgctgacggcccagttcgtgctggtcaacgtggtgatcgctgtgctgatgaagcacctggaggagagcaacaaggaggccaaggaggaggctgagctggaggctgagctggagctggagatgaagaccctcagcccccagccccactcgccgctgggcagccccttcctctggcctggggtcgagggccccgacagccccgacagccccaagcctggggccctgcacccagcggcccatgcgagatcagcctcccacttttccctggagcaccccacggtacagccccaccccacggagctgccaggaccagacttactgaccgtgcggaagtctggggtcagccgaacgcactctctgcccaatgacagctacatgtgtcggcacgggagcattgccgaggggcccctgggacagaggggctgggggctccccaaagctcagtcaggctccgtcttgtccgttcactcccagccagcagacaccagctacatcctgcagcttcccaaagatgcacctcatctgcttcagccctacagcaccccaacctggggcaccatccccaaactgcccccaccaggacgctcccctttggctcaaaggccactcaggcgccaggcagcaataaggactgactccttggacgttcagggcctgggcagccgggaagacctgctggcagaggtgagtgggccctccctgcccctggcccgggcctactctttctggggccagtcgagcacccaggcgcagcagcactcccgcagccacagcaacatctccaagcacatgcccccgcgagccccttgcccaggcccacaacccaactgggacaagggccctccagagaccagaagcagcttagagttggacacggagctgagctggatttcaggagacctcctgccccctggcggccaggaggagcccccatccccacgggacctgaagaagtgctacagcgtggaggcccagagctgccagcgccggcccacgtcctggctggatgagcagaggagacactctatcgccgtcagctgcctggacagtggctcccaaccccacctgggcacagacccctctaaccttgggggccagcctcttggggggcctgggagccgacccaagaaaaaactcagcccgcccagtatctccatagacccccccgagagccaaggccctcggcccccgcccagccctggcgtctgcctccggaggagggctccatccagcgactccaaggatcccttggcctccggcccccctgacagcatggctgcctcgccctccccaaagaaagatgtgctgagtctctccggtttatcctctgacccggcagacctggacccctgagtcctgccccactttcccactcacctttctccactgggtgccaagtcctagctcctcctcctgggctatattcctgacaaaagttccatatagacaccaaggaggcggaggcgctcctccctgcctcagtggctctgggtacctgcaagcagaacttccaaagagagttaaaagcagcagccctggcaactctggctccaggcagaaggagaggcccggtgcagctgaggttcccaacaccaggagctgttgggagaaagcaatacgtctgtgcagaatctctatgaatattctattttattaaattaattgaatctagtatatgcgggatgtacgacattttgtgactgaagagacttgtttccttctacttttatgtgtctcagaatatttttgaggcgaaggcgtctgtctcttggctattttaacctaaaataacagtctagttataatccctcttcttgcaaagcacaagctgggaccgcgagcgcattgcagccccaacggtggcccatcttcagcggagagcgagaaccattttggaaactgtaatgtaacttattttctcctttaacctcgtcatcattttctgtagggaaaaaaaaagaaaaagaaaaaatgagattttacaaatgaaatggaatctttttatatatacatacatacatatctatatatatatatataaaataaagtaattttcctaaataaaaa

SEQ ID NO: 30 - RNA, 8299 nt, Macaca fascicularis
  source 1..8299: mol_type = mRNA
tttttatttaggaaaattactttattttatatatatatatatagatatgtatgtatgtatatataaaaagattccatttcatttgtaaaatctcattttttctttttctttttttttccctacagaaaatgatgacgaggttaaaggagaaaataagttacattacagtttccaaaatggttctcgctctccgctgaagatgggccaccgttggggctgcaatgcgctcgcggtcccagcttgtgctttgcaagaagagggattataactagactgttattttaggttaaaatagccaagagacagacgccttcgcctcaaaaatattctgagacacataaaagtagaaggaaacaagtctcttcagtcacaaaatgtcgtacatcccgcatatactagattcaattaatttaataaaatagaatattcatagagattctgcacagacgtattgctttctcccaacagctcctggtgttgggaacctcagctgcaccgggcctctccttctgcctggagccagagttgccagggctgctgcttttaactctctttggaagttctgcttgcaggtacccagagccactgaggcagggaggagcgcctccgcctccttggtgtctatatggaacttttgtcaggaatatagcccaggaggaggagctaggacttggcacccagtggagaaaggtgagtgggaaagtggggcaggactcaggggtccaggtctgccgggtcagaggataaaccggagagactcagcacatctttctttggggagggcgaggcagccatgctgtcaggggggccggaggccaagggatccttggagtcgctggatggagccctcctccggaggcagacgccagggctgggcgggggccgagggccttggctctcgggggggtctatggagatactgggcgggctgagttttttcttgggtcggctcccaggccccccaagaggctggcccccaaggttagaggggtctgtgcccaggtggggttgggagccactgtccaggcagctgacggcgatagagtgtctcctctgctcatccagccaggacgtgggccggcgctggcagctctgggcctccacgctgtagcacttcttcaggtcccgtggggatgggggctcctcctggccgccagggggcaggaggtctcctgaaatccagctcagctccgtgtccaactctaagctgcttctggtctctggagggcccttgtcccagttgggttgtgggcctgggcaaggggctcgcgggggcatgtgcttggagatgttgctgtggctgcgggagtgctgctgcgcctgggtgctcgactggccccagaaagagtaggcccgggccaggggcagggagggcccactcacctctgccagcaggtcttcccggctgcccaggccctgaacgtccaaggagtcagtccttattgctgcctggcgcctgagtggcctttgagccaaaggggagcgtcctggtgggggcagtttggggatggtgccccaggttggggtgctgtagggctgaagcagatgaggtgcatctttgggaagctgcaggatgtagctggtgtctgctggctgggagtgaacggacaagacggagcctgactgagctttggggagcccccagcccctctgtcccaggggcccctcggcaatgctcccgtgccgacacatgtagctgtcattgggcagagagtgcgttcggctgaccccagacttccgcacggtcagtaagtctggtcctggcagctccgtggggtggggctgtaccgtggggtgctccagggaaaagtgggaggctgatctcgcatgggccgctgggtgcagggccccaggcttggggctgtcggggctgtcggggccctcgaccccaggccagaggaaggggctgcccagcggcgagtggggctgggggctgagggtcttcatctccagctccagctcagcctccagctcagcctcctccttggcctccttgttgctctcctccaggtgcttcatcagcacagcgatcaccacgttgaccagcacgaactgggccgtcagcacgaaggacacaaagtagatgggcgagatgaccgtgttgtagcaggtggactcctggtcacagtcccggagggtgtccttcataatgccgttccagttgtcgcctgtggagactcggaagagggttaggaaggccatgccaaagttccgaaaggtggcatgccggcccaggccctcacaggggtgtgtctcgtcacactccaggtctccaaagagctccacgcccagagctgcaaagatgaaaaacaacaacatgaagagaagtcccaggttccccacctggggcagggcctgcatcaccgtgtccagcagcgcccgcatgcccacagccatcttcagcagcttcagcactcgggcaatgcgcagtaccctcatgatgcggatgatggtggggttgatgggcagtgaggcgttgacctcgatttcctccagcgtgatgcccatgatggacagcagcacaatggccaggtccagctggttccacctgtcctggaagaaccgacggaaaccaaaggccacaagtttgaaaactgactccaaaacaaagatgacagtgaagatgtagttgcagatcttcagagcttcatccagaatctggggctgctggtagtgctccatggccatggtgaccacgttcaacccgatgacacctgtgatgaagagatccaggtagtggctggtgcacaagtggtggacgaggagccggaagcgggagtagtcggagtagtaaggtttgcactgggcttctgacgcagcgctggctgagctgccggaagcaattacatcgtccagcattagattccttctctttttctccagtcttcgtagacgcttctcctcccgccgccgggcctcctcttcctcctggtgctgccgacacttgtggaagttctccaccaccacacccacaaacatgttcaggacaaagaaggccacaatgagcaggaacgagatgaagtacagcagcatccaggggttgtggttcatgatgggctgctggtccacgcccacagcatccagcccatcatacatgatgtccacccagccgtccttggaggccaaaacgaacagggacatcagagcctggccaaggttgtcaaagttgtacttgtgccggacccaccggtaactggcctcagcacagtccgatttattggtgatgttcctggtatcctcgccctggcacacgaaaaacttccctttgaagagctgcacccccaagatgccgaaaatgatgaagaaggcacagcagatgactacaatgttgccgatgggtttcagtgaggacatcagcgtctccaccaccagcttcagcccctgcgcccggctgatcaccctgagcgggcgcagggtccgcagcagccgcagcaccctcagcatgcccaggatcttggtgccgctgtcagagaccatggacaccagaatgtcgatgacggagatgagcaccaacagcccgtccagcacgttccagctgctgcgcaggtacgcctgctccccgaagcaccagcccagtgccaccaccttcactgtcatttcagccagaaagactgcggtgaagatgtaattggagagggtcaggaagatgcgttcagcgctgtgggggtcaattttggggcgctccatggcgatggtgatgcagttaaggaagatgatgacgaggaccacgtggtcaaacatcttgtgggtgatgatgcggtgacacaggaggcggaacctggactgaggagggaagatgtaggctgaccaggagtctcgctcgaggcagcaggcagggagtcgggctcggatccacgcacggacccgttcccctttgctcaggttgccctcgtcatccgcgtcatccccatccagtggggggtcgtcgggccgcagggcccgggccagacgccccgaagccgacttgccattgcagtcctggtgctcagaagcagagcctcggccactggcagtgcggtgcagccctggcacctgcagtgtgtctggcaggtcaaaggaactcttggcctcccgctccagggactccctgtggcgacggtcgctgcccgcggggctggcccgctcctcttctgagctctcctcctcatcctggctctcctggccttctcctgacaacagggaccgccgctccccacttgggcttctccgcttcaggctgggggcacggccgaggctgttccggctggagcgcctgctggtccagctgcttgcagcgctccaggggctgtgcggggagctgcgagcactgggcggtgacttcatctcgtgggccgccccgggctccgccgacccgctgctgctggtgcggcgcgacatggggcccagcgcctcgcccaggcccgtgctggtgctcttgggcagcgacatgggtgtggcggccgtgtggatgatgagaggcggcagcaggctcttccgcagctccggatgctctcccagggacaccaaggccaagcacttcttcctgtccccatcaccatccaggctgggtgagaagaaatcgggctctgattcggacttgttggcatctcccccctgggagtcgacaggcagctgaatacagcttaactgtccactcgcatcttcccgtttgctgatttcctccgcctggaagccctccaccagaatagcgaccagcaaattgaagagcacgtagttgccgaaggtcatgagggcaatgaagtaaagggctgcccaggatgacgtggaggccataccattgtacaggactttgttccagtcctcctgggtgaggatctgaaagacagtgacgatggcccagagcaaggagtcaaaattcttccggtctggcagggtgtccccatcccgctcggaggcaaacttgcagccgaagagatgcatgcccaggatgctgaagatgaagatgaagagcatgagcagcatgcagaaggtggccacgttgtccatggtcttcatgagcaccaccagctgccgctgcagcgccggcaggaagcgcaccagcttcagcacgcgcatcaggcggaaggtccgcagcaccgacaggccgcccccctgctggcccacgatctcccacacgctgatgaccacaatgacaccgtcgaagatgttgtagggattcttgatgtagccaaagggaccatacacgagcagcttcagcagcatctccagggcaaagaggctggtgaagacgatgttgctgatttctagggcgttggtaagctcctcgggctgctcatggtattcgatgcccatgctgagtgtattgaccaggatggcaatcatgattccccggccaaagtacttgctgtccacaatctttcggaaggtgtcacagattagcctccagaaggccagcacagagctgggctctgcatctgggcccaggctccgttgccgccggctgtgggggtcccggaggtcactgtgctgggcatcctgtgtgaactcataaaccgcctcgctgtctgagtcaggcatttcacggtcggcgagctctacctcccctgcccccgcccgggcacagtaggggcagctgtctggaccagaggctccactgtctgccttcaagcaagggctggagatcttgcaagagctttggcaggcacctgtactctgtgtctccagcagcttgtgcatggagctgtagggcccaggtgggatgttgaggctggtgagggttgtgggcccagagctggcagccacctctactagtgccttctctttcagcgtctccggtggagggctggtgtgcacggtgggatacaccttcccgctgcccacagtcctgccggatgcctcagatggggacctgggagggggtgcctggcagcggactggctctaagtggcagtcggcatggtagaagctgtgcacagactctgcgccacctggggggcccccggagagggcaggcgtcgagggtggtggcagcatgagccggcgggacccattggcatccctgtcctggatctctgggctggcccgggggaccctgagcgttccattgcccaggtggtagtggtggtgatggtggtggtggtggtgcaccaggtggtggacggacaggcggcggtgagagcgagagcagctgctgctgggctgggtctcctggcccccaaggggtgctgggctgctgagcagcccagcccgcacacctgctgcccgagagacctgagccagcctgcgggctgccttacgaaggatgtacaccaggtacttgagcagctcctcatagcagctgccgggctcagagaagctagccagggtgctggcgttggacaggaaccgcacacgctgctcccgcatcagctggctttccctctgcttggtctctgagaactgcgtggcaatcaccaccaggcacaggttgatcatgaagaaggagcccacgatgatgaggaggatgaagtagatgaaattgtagaaggaatgagcatccatcacaaagtacatgatgtcgacccagccctccagtgtgatgacctggaagatggcgatccaggcatagccaatgttgtcaaagttgatggcgcccttgaaggggttgtgctcccccgctgagcagttggtgtagtactggttccagttgacacaggtggtattgctggagctgttgtaggcctcatagtccagaccacaaggtgggccaccgcccccctccccacgcaacgtgggcacgcttctgcaggaccgcatgccgttctcgcgtggctgggagcagatgaaggggctctcatcctcattctctgtctggtaatagcgctccaggtccacgcttagggggaggctaaaattctcaggtaggaagcatcgattccgaagcagccctgcccacagctggacgccgacgatgccaaagatgaagaagacgaagaagcagagcagcaggacgttgcccagcatgggcagtgtgtccagcaacaacgtgacaaggatgcgcatgctgggcacccggttaatggccctgagcggtcgcagcacacggactgtcctgacagctgagaagctgacgttctgcaggtccagcgagtactccaacatccctgcaatgacgatgaaaaagtcaagccggttccaagtgtctcccaggtaacactttttcccaaagatgcccaaggccaccatcttcaccaccatctccacggcgaagaaggcaaagatgaagtcatcaaaggcctgcaggatccggcagcgctgggagtcacaggcgatgtcctcgcacggccggaacatgcccagggtcacgcagttgagaaggatgaccaacatgctgatacgctcaaaccaggggttacagaccgtgcggagacaccagctccgcgggcggctgtcctggctcaagtagaagaaaaccaccggggccagcgccgggtacggcagtccctccgcctcggagtccgcgctgcccgggtccttttctgctgaccccggcccccgccggcccccggcccccgacaggtcgttgagccgcatgaagctccggggctgtcccgactcctctgcgcccgctccatcctcctcctcgtccatcctctggccagccggggccccgggcggtccggagaggggcaagcggcgcccctccgaggagatgtcctcacgcaacccgggagccccggcgggggcacatctggggggctctagggcgcaagctgagcccccgggagggccagttcagtccagctccccctgcccgcaggggcatgctgcccgcggggcgccggggcgcagggaaaccccgcccggcgcaagtcccgcttcccctgcgcccctggggctccccgggccagccggccggctccccctcactttgttccggcttcttcgcttcgcgcccaggctccggttgccggattcggcgctaccttcggcgaagcggccccgagagggcgagcgaaaaggggggcagcggcgaagggcgggggtccggggaggggcgccccctcttcccgcggcgcagctggagccggatctaaggggtcagcatcgtcccggctccgcgccaggcggcgggggaggggaggagggatctctttaggggtgggcttggagggggtgggggcggctccttcccccgccccgcggcgggctcacggtccgggaggggcggggagacggtggggggcagtcccgggcgggagtggaggcggagatgccgccgccgcagccgccgcggtggctgccgctgccgtagctgtcgccggcgccactgcctcctcctccggccgagacgcggagcgagcgagcgaaagcggcggcg

SEQ ID NO: 31 - RNA, 2324 nt, Homo sapiens
  source 1..2324: mol_type = mRNA
attccagcgcctgacagccaggaccccaggcagcagcgagtgacaggacgtctggaccggcgcgccgctagcagctctgccgggccgcggcggtgatcgatggggagcggctggagcggacccagcgagtgagggcgcacagccgggacgccgaggcggcgggcgggagacccgcaccagcgcagccggccctcggcgggacgtgacgcagcgcccggggcgcgggtttgatatttgacaaattgatctaaaatggctgggtttttatctgaataactcactgatgccatcccagaaagtcggcaccaggtgtatttgatatagtgtttgcaacaaattcgacccaggtgatcaaaatgattctcaactcttctactgaagatggtattaaaagaatccaagatgattgtcccaaagctggaaggcataattacatatttgtcatgattcctactttatacagtatcatctttgtggtgggaatatttggaaacagcttggtggtgatagtcatttacttttatatgaagctgaagactgtggccagtgtttttcttttgaatttagcactggctgacttatgctttttactgactttgccactatgggctgtctacacagctatggaataccgctggccctttggcaattacctatgtaagattgcttcagccagcgtcagtttcaacctgtacgctagtgtgtttctactcacgtgtctcagcattgatcgatacctggctattgttcacccaatgaagtcccgccttcgacgcacaatgcttgtagccaaagtcacctgcatcatcatttggctgctggcaggcttggccagtttgccagctataatccatcgaaatgtatttttcattgagaacaccaatattacagtttgtgctttccattatgagtcccaaaattcaaccctcccgatagggctgggcctgaccaaaaatatactgggtttcctgtttccttttctgatcattcttacaagttatactcttatttggaaggccctaaagaaggcttatgaaattcagaagaacaaaccaagaaatgatgatatttttaagataattatggcaattgtgcttttctttttcttttcctggattccccaccaaatattcacttttctggatgtattgattcaactaggcatcatacgtgactgtagaattgcagatattgtggacacggccatgcctatcaccatttgtatagcttattttaacaattgcctgaatcctcttttttatggctttctggggaaaaaatttaaaagatattttctccagcttctaaaatatattcccccaaaagccaaatcccactcaaacctttcaacaaaaatgagcacgctttcctaccgcccctcagataatgtaagctcatccaccaagaagcctgcaccatgttttgaggttgagtgacatgttcgaaacctgtccataaagtaattttgtgaaagaaggagcaagagaacattcctctgcagcacttcactaccaaatgagcattagctacttttcagaattgaaggagaaaatgcattatgtggactgaaccgacttttctaaagctctgaacaaaagcttttctttccttttgcaacaagacaaagcaaagccacattttgcattagacagatgacggctgctcgaagaacaatgtcagaaactcgatgaatgtgttgatttgagaaattttactgacagaaatgcaatctccctagcctgcttttgtcctgttattttttatttccacataaaggtatttagaatatattaaatcgttagaggagcaacaggagatgagagttccagattgttctgtccagtttccaaagggcagtaaagttttcgtgccggttttcagctattagcaactgtgctacacttgcacctggtactgcacattttgtacaaagatatgctaagcagtagtcgtcaagttgcagatctttttgtgaaattcaacctgtgtcttataggtttccactgccaaaacaatgcccgtaagatggcttatttgtataatggtgttactaaagtcacatataaaagttaaactacttgtaaaggtgctgcactggtcccaagtagtagtgtcttcctagtatattagtttgatttaatatctgagaagtgtatatagtttgtggtaaaaagattatatatcataaagtatgccttcctgtttaaaaaaagtatatattctacacatatatgtatatgtatatctatatctctaaactgctgttaattgattaaaatctggcaaagttatatttactttaaaataaaataattttattgcaa

SEQ ID NO: 32 - RNA, 2324 nt, Homo sapiens
  source 1..2324: mol_type = mRNA
ttgcaataaaattattttattttaaagtaaatataactttgccagattttaatcaattaacagcagtttagagatatagatatacatatacatatatgtgtagaatatatactttttttaaacaggaaggcatactttatgatatataatctttttaccacaaactatatacacttctcagatattaaatcaaactaatatactaggaagacactactacttgggaccagtgcagcacctttacaagtagtttaacttttatatgtgactttagtaacaccattatacaaataagccatcttacgggcattgttttggcagtggaaacctataagacacaggttgaatttcacaaaaagatctgcaacttgacgactactgcttagcatatctttgtacaaaatgtgcagtaccaggtgcaagtgtagcacagttgctaatagctgaaaaccggcacgaaaactttactgccctttggaaactggacagaacaatctggaactctcatctcctgttgctcctctaacgatttaatatattctaaatacctttatgtggaaataaaaaataacaggacaaaagcaggctagggagattgcatttctgtcagtaaaatttctcaaatcaacacattcatcgagtttctgacattgttcttcgagcagccgtcatctgtctaatgcaaaatgtggctttgctttgtcttgttgcaaaaggaaagaaaagcttttgttcagagctttagaaaagtcggttcagtccacataatgcattttctccttcaattctgaaaagtagctaatgctcatttggtagtgaagtgctgcagaggaatgttctcttgctccttctttcacaaaattactttatggacaggtttcgaacatgtcactcaacctcaaaacatggtgcaggcttcttggtggatgagcttacattatctgaggggcggtaggaaagcgtgctcatttttgttgaaaggtttgagtgggatttggcttttgggggaatatattttagaagctggagaaaatatcttttaaattttttccccagaaagccataaaaaagaggattcaggcaattgttaaaataagctatacaaatggtgataggcatggccgtgtccacaatatctgcaattctacagtcacgtatgatgcctagttgaatcaatacatccagaaaagtgaatatttggtggggaatccaggaaaagaaaaagaaaagcacaattgccataattatcttaaaaatatcatcatttcttggtttgttcttctgaatttcataagccttctttagggccttccaaataagagtataacttgtaagaatgatcagaaaaggaaacaggaaacccagtatatttttggtcaggcccagccctatcgggagggttgaattttgggactcataatggaaagcacaaactgtaatattggtgttctcaatgaaaaatacatttcgatggattatagctggcaaactggccaagcctgccagcagccaaatgatgatgcaggtgactttggctacaagcattgtgcgtcgaaggcgggacttcattgggtgaacaatagccaggtatcgatcaatgctgagacacgtgagtagaaacacactagcgtacaggttgaaactgacgctggctgaagcaatcttacataggtaattgccaaagggccagcggtattccatagctgtgtagacagcccatagtggcaaagtcagtaaaaagcataagtcagccagtgctaaattcaaaagaaaaacactggccacagtcttcagcttcatataaaagtaaatgactatcaccaccaagctgtttccaaatattcccaccacaaagatgatactgtataaagtaggaatcatgacaaatatgtaattatgccttccagctttgggacaatcatcttggattcttttaataccatcttcagtagaagagttgagaatcattttgatcacctgggtcgaatttgttgcaaacactatatcaaatacacctggtgccgactttctgggatggcatcagtgagttattcagataaaaacccagccattttagatcaatttgtcaaatatcaaacccgcgccccgggcgctgcgtcacgtcccgccgagggccggctgcgctggtgcgggtctcccgcccgccgcctcggcgtcccggctgtgcgccctcactcgctgggtccgctccagccgctccccatcgatcaccgccgcggcccggcagagctgctagcggcgcgccggtccagacgtcctgtcactcgctgctgcctggggtcctggctgtcaggcgctggaat

SEQ ID NO: 33 - RNA, 2284 nt, Mus musculus
  source 1..2284: mol_type = mRNA
gaggagtgcaaagccttagggttggaacctgcggagtagcaacgtccccctaggctataaatatggaagtgcctcgctgctgatcgccaggcagttgggagggactggatgatgctgtctggccggagaggactcgaggcttgagtcctggtccacgggtcgctggggtgggtcgctggggtggctgaagccagtaccagctctgcggctctcccagctctgctgctctcccggacttaacatatgaaagattggtataaaatggctggcattttgtctggataactcacagcaaccctccaagaaagccatcaccagatcaagtgcattttgaacagtgtctgagaccaactcaacccagaaaagcaaaatggcccttaactcttctactgaagatggcatcaaaagaattcaagatgactgccccagggctggcaggcacagttacatatttgtcatgatccctactctctacagcatcatctttgtggtgggaatatttggaaacagcttggtggtgatcgtcatctacttttacatgaagctgaagactgtggccagtgtctttcttctaaatctcgccctggctgacttatgctttttgctgactttgcccctgtgggctgtctataccgctatggaataccgctggcccttcggcaatcacctatgtaagatcgcttcggccagcgtcagtttcaacctctacgccagcgtgttcctgctcacgtgtctcagcatcgatcgctacctggccattgtccacccgatgaagtctcgcctccgccgcacgatgctggtggccaaagtcacctgcatcatcatctggctgatggctggcttggccagtttgccagccgtcatccaccgaaatgtgtatttcattgagaacaccaatatcactgtttgcgcttttcattacgagtcccggaattcaacgctccccataggactgggcctaaccaagaacatcctgggcttcctgttccctttcctaatcattcttaccagctatactcttatatggaaagctctaaagaaggcttatgaaattcagaagaacaagccaagaaatgatgacatctttaggataattatggcgattgtgcttttcttcttcttctcctgggtcccccaccaaatattcacattcctggatgtgctgattcagctgggcgtcatccatgactgtaaaattgccgacatcgtggacactgccatgcccataaccatctgcatagcgtattttaacaactgcctgaaccctctgttttacggctttctggggaaaaaatttaaaaagtatttcctccagctcctgaaatatattcccccaaaggccaagtcgcactcaagcctgtctacgaaaatgagcacgctctcctaccgcccctcagataacatgagctcagccgccaaaaagcctgcgtcttgttctgaggtggagtgacaggttcaaagcttgctggcaatgtaatgccctgacagaaaccagggcagcatcggactaaatggctcacgaccaaaggaccagtccccccccccccctcaggatctaagcagaaaatgcgttcaacagactgtagatattgtctgaagctctgagagaaagctttgaagaagtaattatgcaaagctgtcttacattaatagatgatggctgccccaaggacaagtcaggagctggatggatttgtgggtttaaaacggtttgctggcagacacgcaatcgcagcggtctccttttgatttccacacataggtatgtagcatgtgctaaatatttagacaagaaacaagaaatggaagtcgaggttacttgttctgctcagttccccaagggcaaggaaccttgtttgtccctttagtcattagcaatggagacccacgtgtccctgttactacacatactttgaaaagatctgctaacctggagtcatcaagtttcaggagccctttgtaaaattcagccagtgtcttagaaacctgtactgtccccaaacaatgccagttagtggtgtatttatgtagcagtgtaagcaaagttacacatcaaagttgcactgcttgtaccaaccgtgacatagtaggtatatcagctttagttcacatctgagaaacataaacagtcggtggtgaatagactacatatcatacaatctgccttgttctctaaaagtatatatcctccacatatatgtacatatgtatctctaagctgtcatttgatgaagttttggcaatgtatgtttacctctaaataaagtaattttattgtaacgta

SEQ ID NO: 34 - RNA, 2284 nt, Mus musculus
  source 1..2284: mol_type = mRNA
tacgttacaataaaattactttatttagaggtaaacatacattgccaaaacttcatcaaatgacagcttagagatacatatgtacatatatgtggaggatatatacttttagagaacaaggcagattgtatgatatgtagtctattcaccaccgactgtttatgtttctcagatgtgaactaaagctgatatacctactatgtcacggttggtacaagcagtgcaactttgatgtgtaactttgcttacactgctacataaatacaccactaactggcattgtttggggacagtacaggtttctaagacactggctgaattttacaaagggctcctgaaacttgatgactccaggttagcagatcttttcaaagtatgtgtagtaacagggacacgtgggtctccattgctaatgactaaagggacaaacaaggttccttgcccttggggaactgagcagaacaagtaacctcgacttccatttcttgtttcttgtctaaatatttagcacatgctacatacctatgtgtggaaatcaaaaggagaccgctgcgattgcgtgtctgccagcaaaccgttttaaacccacaaatccatccagctcctgacttgtccttggggcagccatcatctattaatgtaagacagctttgcataattacttcttcaaagctttctctcagagcttcagacaatatctacagtctgttgaacgcattttctgcttagatcctgagggggggggggggactggtcctttggtcgtgagccatttagtccgatgctgccctggtttctgtcagggcattacattgccagcaagctttgaacctgtcactccacctcagaacaagacgcaggctttttggcggctgagctcatgttatctgaggggcggtaggagagcgtgctcattttcgtagacaggcttgagtgcgacttggcctttgggggaatatatttcaggagctggaggaaatactttttaaattttttccccagaaagccgtaaaacagagggttcaggcagttgttaaaatacgctatgcagatggttatgggcatggcagtgtccacgatgtcggcaattttacagtcatggatgacgcccagctgaatcagcacatccaggaatgtgaatatttggtgggggacccaggagaagaagaagaaaagcacaatcgccataattatcctaaagatgtcatcatttcttggcttgttcttctgaatttcataagccttctttagagctttccatataagagtatagctggtaagaatgattaggaaagggaacaggaagcccaggatgttcttggttaggcccagtcctatggggagcgttgaattccgggactcgtaatgaaaagcgcaaacagtgatattggtgttctcaatgaaatacacatttcggtggatgacggctggcaaactggccaagccagccatcagccagatgatgatgcaggtgactttggccaccagcatcgtgcggcggaggcgagacttcatcgggtggacaatggccaggtagcgatcgatgctgagacacgtgagcaggaacacgctggcgtagaggttgaaactgacgctggccgaagcgatcttacataggtgattgccgaagggccagcggtattccatagcggtatagacagcccacaggggcaaagtcagcaaaaagcataagtcagccagggcgagatttagaagaaagacactggccacagtcttcagcttcatgtaaaagtagatgacgatcaccaccaagctgtttccaaatattcccaccacaaagatgatgctgtagagagtagggatcatgacaaatatgtaactgtgcctgccagccctggggcagtcatcttgaattcttttgatgccatcttcagtagaagagttaagggccattttgcttttctgggttgagttggtctcagacactgttcaaaatgcacttgatctggtgatggctttcttggagggttgctgtgagttatccagacaaaatgccagccattttataccaatctttcatatgttaagtccgggagagcagcagagctgggagagccgcagagctggtactggcttcagccaccccagcgacccaccccagcgacccgtggaccaggactcaagcctcgagtcctctccggccagacagcatcatccagtccctcccaactgcctggcgatcagcagcgaggcacttccatatttatagcctagggggacgttgctactccgcaggttccaaccctaaggctttgcactcctc

SEQ ID NO: 35 - RNA, 2208 nt, Rattus norvegicus
  source 1..2208: mol_type = mRNA
gggactggatgatgctgtcccgctggagaggattcgtggcttgagtcctgttccacccgatcaccgatcaccggggtggccgaggccggtaccagcgctgcggctctctcagctctgccacattccctgagttaacatatgagagattggtataaaatggctggcattttgtctggataaatcacacaaccctcccagaaagtgatcaccaggtcaagtggatttcgaatagtgtctgagaccaactcaacccagaaaaacaaaatggcccttaactcttctgctgaagatggtatcaaaagaatccaagatgactgccccaaggctggcaggcacagttacatatttgtcatgatccctaccctctacagcatcatctttgtggtgggaatatttggaaacagcttggtggtgattgtcatttacttttacatgaagctgaagactgtggccagcgtctttcttctcaatctcgccttggctgacttatgctttttgctgactttgcccctgtgggcagtctataccgctatggagtaccgctggcccttcggcaatcacctatgtaagatcgcttcggccagcgtgagcttcaacctctacgccagtgtgttccttctcacgtgtctcagcatcgaccgctacctggccatcgtccacccaatgaagtctcgccttcgccgcacgatgctggtggccaaagtcacctgcatcatcatctggctgatggctggcttggccagtttgccagctgtcatccaccgaaatgtatacttcatcgagaacaccaatatcacagtgtgcgcgtttcattatgagtctcggaattcgacgctccccatagggctgggccttaccaagaatattctgggcttcttgttccctttccttatcattctcaccagctatacccttatttggaaagctctaaagaaggcttatgaaattcaaaagaacaaaccaagaaacgatgacatctttaggataattatggcgattgtgcttttcttcttcttttcctgggtcccccaccaaatattcactttcctggatgtgctgattcagctgggcgtcatccatgactgtaaaatttctgacatcgtggacactgccatgcccatcaccatctgcatagcgtattttaacaactgcctgaaccctctgttctacggctttctggggaagaaatttaaaaagtatttcctccagctcctgaaatatattcccccaaaggccaagtcccactcaagcctgtctacgaaaatgagcacgctttcttaccggccttcggataacatgagctcatcggccaaaaagcctgcgtcttgttttgaggtggagtgacaggttcaaagcacactggcaatgtaatgccctgacagaagccagggcagcctctgactaaatggcttacgaccaaaggaccattcaccctgcctcaggatctaagcagaaaatgcgctcatcagactgtagataatgactaaaactctgagagaagactttgaaggagtaaccaagcaaagccgtcttgcattaatagatgatggctagccaaaggaagagtcaggagctggatggattggtgggtctggaaaacagttcgctggcagaaatgcaatctcatcagtctccctttgctatgttccttttgatttccacacgtaggtatgtggcccatgctaaatatttaggcaagaaacaagagatggaaatcaaggtcacttgttctgttcaactcccaaagggcaaggaacctttgttgtccctgtagtcattagcagtggagacccacttgtcactgttactacacctatcgtgcaaagatttgctaatctgtagttatcaagtttcaggactcctttgtaaaattcagccagtgttttagaaacatgtactgtccccagacaatgctagccagtggtgtacttatgtagcagtgttacccaagtccacacatcaaagtcacactgctttaataacgtgacatactaggtacatctgcgttatttcgcatctgagaaatgtacacagtcagaggtgaatacactatattccatacagtctgccttgctctctaaaaatatatattctccacatacgtgaacatctttatctctaaactgtcatttgatgaaattttggcaatgtatgtttacctctaaataaagtaattttattgtaaaaaaaaaaaaaaaaaaaaaaaaa

SEQ ID NO: 36 - RNA, 2208 nt, Rattus norvegicus
  source 1..2208: mol_type = mRNA
tttttttttttttttttttttttttacaataaaattactttatttagaggtaaacatacattgccaaaatttcatcaaatgacagtttagagataaagatgttcacgtatgtggagaatatatatttttagagagcaaggcagactgtatggaatatagtgtattcacctctgactgtgtacatttctcagatgcgaaataacgcagatgtacctagtatgtcacgttattaaagcagtgtgactttgatgtgtggacttgggtaacactgctacataagtacaccactggctagcattgtctggggacagtacatgtttctaaaacactggctgaattttacaaaggagtcctgaaacttgataactacagattagcaaatctttgcacgataggtgtagtaacagtgacaagtgggtctccactgctaatgactacagggacaacaaaggttccttgccctttgggagttgaacagaacaagtgaccttgatttccatctcttgtttcttgcctaaatatttagcatgggccacatacctacgtgtggaaatcaaaaggaacatagcaaagggagactgatgagattgcatttctgccagcgaactgttttccagacccaccaatccatccagctcctgactcttcctttggctagccatcatctattaatgcaagacggctttgcttggttactccttcaaagtcttctctcagagttttagtcattatctacagtctgatgagcgcattttctgcttagatcctgaggcagggtgaatggtcctttggtcgtaagccatttagtcagaggctgccctggcttctgtcagggcattacattgccagtgtgctttgaacctgtcactccacctcaaaacaagacgcaggctttttggccgatgagctcatgttatccgaaggccggtaagaaagcgtgctcattttcgtagacaggcttgagtgggacttggcctttgggggaatatatttcaggagctggaggaaatactttttaaatttcttccccagaaagccgtagaacagagggttcaggcagttgttaaaatacgctatgcagatggtgatgggcatggcagtgtccacgatgtcagaaattttacagtcatggatgacgcccagctgaatcagcacatccaggaaagtgaatatttggtgggggacccaggaaaagaagaagaaaagcacaatcgccataattatcctaaagatgtcatcgtttcttggtttgttcttttgaatttcataagccttctttagagctttccaaataagggtatagctggtgagaatgataaggaaagggaacaagaagcccagaatattcttggtaaggcccagccctatggggagcgtcgaattccgagactcataatgaaacgcgcacactgtgatattggtgttctcgatgaagtatacatttcggtggatgacagctggcaaactggccaagccagccatcagccagatgatgatgcaggtgactttggccaccagcatcgtgcggcgaaggcgagacttcattgggtggacgatggccaggtagcggtcgatgctgagacacgtgagaaggaacacactggcgtagaggttgaagctcacgctggccgaagcgatcttacataggtgattgccgaagggccagcggtactccatagcggtatagactgcccacaggggcaaagtcagcaaaaagcataagtcagccaaggcgagattgagaagaaagacgctggccacagtcttcagcttcatgtaaaagtaaatgacaatcaccaccaagctgtttccaaatattcccaccacaaagatgatgctgtagagggtagggatcatgacaaatatgtaactgtgcctgccagccttggggcagtcatcttggattcttttgataccatcttcagcagaagagttaagggccattttgtttttctgggttgagttggtctcagacactattcgaaatccacttgacctggtgatcactttctgggagggttgtgtgatttatccagacaaaatgccagccattttataccaatctctcatatgttaactcagggaatgtggcagagctgagagagccgcagcgctggtaccggcctcggccaccccggtgatcggtgatcgggtggaacaggactcaagccacgaatcctctccagcgggacagcatcatccagtccc

SEQ ID NO: 37 - RNA, 2163 nt, Macaca mulatta
  source 1..2163: mol_type = mRNA
gacttcaggggtggggtgctaagtttcatgtcacggtgtcctaactgctggctctatactgggaagctctctgggaccaaggaaagagcgaccgtagttctggtcaacgcctgcccctggagctggccacacttcaccagatcaggtgcatttgatatagtgtttgtgacaaattcgacccaggagatcaaaatgattctcaactcttctaccgaagatggtattaaaagaatccaagacgattgtcccaaagctggaaggcataattacatatttgtcatgattcctactttatacagtatcatctttgtggtgggaatatttggaaacagcttggtggtgatagtcatttacttttacatgaagctgaagactgtggccagtgtttttcttttgaatttagcactggctgacttatgctttttactgactttgccactatgggctgtctacacagctatggaataccgctggccctttggcaattacctatgtaagattgcttcagccagcgtcagtttcaacctgtatgctagtgtgttcctactcacgtgtctcagcattgatcgatacctggctattgttcacccaatgaagtcccgccttcgacgcacaatgcttgtagccaaagtcacctgcatcgtcatttggctgctggcaggcttggccagtttgccagctataatccatcgaaatgtatttttcattgagaacaccaatattacagtttgtgctttccattatgagtcccaaaattcaacccttccgataggactgggcctgaccaaaaatatactgggtttcctgtttccttttctgatcattcttacaagttatactcttatttggaaggccctaaagaaggcttatgaaattcagaagaacaaaccaagaaatgatgatatttttaagataattatggcaattgtgcttttctttttcttttcctggattccccaccaaatattcacttttctggatgtattgattcaactaggcatcatacgtgactgtagaatttcagatattgtggacacagccatgcccatcaccatttgtatagcttattttaacaattgcctgaatcctcttttttatggctttctggggaaaaaatttaaaaaatattttctccagcttctaaaatacattcccccaaaagccaaatcccactcaaacctttcaacaaaaatgagcacgctttcctaccgcccctcagataatgcaagctcatccaccaagaagcctgcaccatgttttgaggttgagtgacatgttcgaaacctgtccataaagtaattttgtgaaagaaggagcaagagaacattcctcggcagcacttcactaccaaatgagcattagctgcttttcagaattgaaggagaaaatggattatgtggactgaactgacttttctaaagctctgaacaaaagcttttctttccctttgcaacaagacacagcaaagccacattttgcattagacagatgatggctgctcgaagaacaatgtcagaaactcattgaatgtgttgatttgagaaattttactgacagaaatgcaatctccctagtctgtttttgtcctgttatttttttatttccacataaaggtatttagaacatattaaattgttagaggagcaacaggaaatgagagttcaagattgttctgtccaatttccaaagggcagtaaagcttttgtgcctgtttttagctattagcaactgtgccacacttgcacctattactgcacattttgtacaaagatttgctaagcagtagttgtcaagtttcagatctttttgtgaaatgcaacctgtgtctcataggtttacactgccaaaacaatgcccgtaagatggcttatttgtataatggtgttactaaagtcacatataaaagttaaactacttgtaaaggtgctgcgcgggtcccaagtagtagtgtcttcctagtatattagtttgatttaatatctgagaagtgtatatagtttgtggtaaaaagattatatatcatgaagtatgccttcttgttttaaaaaagtatatattctacacatatatgtatatgtatatctatatctgaactgctgttaattgattaaaatttggcaaagttatatatactttaaaataaaataattttattgcaatgta

SEQ ID NO: 38 - RNA, 2163 nt, Macaca mulatta
  source 1..2163: mol_type = mRNA
tacattgcaataaaattattttattttaaagtatatataactttgccaaattttaatcaattaacagcagttcagatatagatatacatatacatatatgtgtagaatatatacttttttaaaacaagaaggcatacttcatgatatataatctttttaccacaaactatatacacttctcagatattaaatcaaactaatatactaggaagacactactacttgggacccgcgcagcacctttacaagtagtttaacttttatatgtgactttagtaacaccattatacaaataagccatcttacgggcattgttttggcagtgtaaacctatgagacacaggttgcatttcacaaaaagatctgaaacttgacaactactgcttagcaaatctttgtacaaaatgtgcagtaataggtgcaagtgtggcacagttgctaatagctaaaaacaggcacaaaagctttactgccctttggaaattggacagaacaatcttgaactctcatttcctgttgctcctctaacaatttaatatgttctaaatacctttatgtggaaataaaaaaataacaggacaaaaacagactagggagattgcatttctgtcagtaaaatttctcaaatcaacacattcaatgagtttctgacattgttcttcgagcagccatcatctgtctaatgcaaaatgtggctttgctgtgtcttgttgcaaagggaaagaaaagcttttgttcagagctttagaaaagtcagttcagtccacataatccattttctccttcaattctgaaaagcagctaatgctcatttggtagtgaagtgctgccgaggaatgttctcttgctccttctttcacaaaattactttatggacaggtttcgaacatgtcactcaacctcaaaacatggtgcaggcttcttggtggatgagcttgcattatctgaggggcggtaggaaagcgtgctcatttttgttgaaaggtttgagtgggatttggcttttgggggaatgtattttagaagctggagaaaatattttttaaattttttccccagaaagccataaaaaagaggattcaggcaattgttaaaataagctatacaaatggtgatgggcatggctgtgtccacaatatctgaaattctacagtcacgtatgatgcctagttgaatcaatacatccagaaaagtgaatatttggtggggaatccaggaaaagaaaaagaaaagcacaattgccataattatcttaaaaatatcatcatttcttggtttgttcttctgaatttcataagccttctttagggccttccaaataagagtataacttgtaagaatgatcagaaaaggaaacaggaaacccagtatatttttggtcaggcccagtcctatcggaagggttgaattttgggactcataatggaaagcacaaactgtaatattggtgttctcaatgaaaaatacatttcgatggattatagctggcaaactggccaagcctgccagcagccaaatgacgatgcaggtgactttggctacaagcattgtgcgtcgaaggcgggacttcattgggtgaacaatagccaggtatcgatcaatgctgagacacgtgagtaggaacacactagcatacaggttgaaactgacgctggctgaagcaatcttacataggtaattgccaaagggccagcggtattccatagctgtgtagacagcccatagtggcaaagtcagtaaaaagcataagtcagccagtgctaaattcaaaagaaaaacactggccacagtcttcagcttcatgtaaaagtaaatgactatcaccaccaagctgtttccaaatattcccaccacaaagatgatactgtataaagtaggaatcatgacaaatatgtaattatgccttccagctttgggacaatcgtcttggattcttttaataccatcttcggtagaagagttgagaatcattttgatctcctgggtcgaatttgtcacaaacactatatcaaatgcacctgatctggtgaagtgtggccagctccaggggcaggcgttgaccagaactacggtcgctctttccttggtcccagagagcttcccagtatagagccagcagttaggacaccgtgacatgaaacttagcaccccacccctgaagtc

SEQ ID NO: 39 - RNA, 2172 nt, Macaca fascicularis
  source 1..2172: mol_type = mRNA
ggcacgcttgggggacttcaggggtggggtgctaagtttcatgtcacggtgtcctaactgctggctctatactgggaagctctctgggaccaaggaaagagcgaccgtagttctggtcaacgcctgcccctggagctggccacacttcaccagatcaggtgcatttgatatagtgtttgtgacaaattcgacccaggagatcaaaatgattctcaactcttctaccgaagatggtattaaaagaatccaagacgattgtcccaaagctggaaggcataattacatatttgtcatgattcctactttatacagtatcatctttgtggtgggaatatttggaaacagcttggtggtgatagtcatttacttttacatgaagctgaagactgtggccagtgtttttcttttgaatttagcactggctgacttatgctttttactgactttgccactatgggctgtctacacagctatggaataccgctggccctttggcaattacctatgtaagattgcttcagccagcgtcagtttcaacctgtatgctagtgtgttcctactcacgtgtctcagcattgatcgatacctggctattgttcacccaatgaagtcccgccttcgacgcacaatgcttgtagccaaagtcacctgcatcgtcatttggctgctggcaggcttggccagtttgccagctataatccatcgaaatgtatttttcattgagaacaccaatattacagtttgtgctttccattatgagtcccaaaattcaacccttccgataggactgggcctgaccaaaaatatactgggtttcctgtttccttttctgatcattcttacaagttatactcttatttggaaggccctaaagaaggcttatgaaattcagaagaacaaaccaagaaatgatgatatttttaagataattatggcaattgtgcttttctttttcttttcctggattccccaccaaatattcacttttctggatgtattgattcaactaggcatcatacgtgactgtagaatttcagatattgtggacacagccatgcccatcaccatttgtatagcttattttaacaattgcctgaatcctcttttttatggctttctggggaaaaaatttaaaaaatattttctccagcttctaaaatacattcccccaaaagccaaatcccactcaaacctttcaacaaaaatgagcacgctttcctaccgcccctcagataatgcaagctcatccaccaagaagcctgcaccatgttttgaggttgagtgacatgttcgaaacctgtccataaagtaattttgtgaaagaaggagcaagagaacattcctcggcagcacttcactaccaaatgagcattagctgcttttcagaattgaaggagaaaatggattatgtggactgaactgacttttctaaagctctgaacaaaagcttttctttccctttgcaacaagacacagcaaagccacattttgcattagacagatgatggctgctcgaagaacaatgtcagaaactcattgaatgtgttgatttgagaaattttactgacagaaatgcaatctccctagtctgtttttgtcctgttatttttttatttccacataaaggtatttagaacatattaaattgttagaggagcaacaggaaatgagagttcaagattgttctgtccaatttccaaagggcagtaaagcttttgtgcctgtttttagctattagcaactgtgccacacttgcacctattactgcacattttgtacaaagatttgctaagcagtagttgtcaagtttcagatctttttgtgaaatgcaacctgtgtctcataggtttacactgccaaaacaatgcccgtaagatggcttatttgtataatggtgttactaaagtcacatataaaagttaaactacttgtaaaggtgctgcgcgggtcccacgtagtagtgtcttcctaatatattagtttgatttaatatctgagaagtgtatatagtttgtggtaaaaagattatatatcatgaagtatgccttcttgttttaaaaaagtatatattctacacatatatgtatatgtatatctatatctgaactgctgttaattgattaaaatttggcaaagttatatatactttaaaataaaataattttattgcaa

SEQ ID NO: 40 - RNA, 2172 nt, Macaca fascicularis
  source 1..2172: mol_type = mRNA
ttgcaataaaattattttattttaaagtatatataactttgccaaattttaatcaattaacagcagttcagatatagatatacatatacatatatgtgtagaatatatacttttttaaaacaagaaggcatacttcatgatatataatctttttaccacaaactatatacacttctcagatattaaatcaaactaatatattaggaagacactactacgtgggacccgcgcagcacctttacaagtagtttaacttttatatgtgactttagtaacaccattatacaaataagccatcttacgggcattgttttggcagtgtaaacctatgagacacaggttgcatttcacaaaaagatctgaaacttgacaactactgcttagcaaatctttgtacaaaatgtgcagtaataggtgcaagtgtggcacagttgctaatagctaaaaacaggcacaaaagctttactgccctttggaaattggacagaacaatcttgaactctcatttcctgttgctcctctaacaatttaatatgttctaaatacctttatgtggaaataaaaaaataacaggacaaaaacagactagggagattgcatttctgtcagtaaaatttctcaaatcaacacattcaatgagtttctgacattgttcttcgagcagccatcatctgtctaatgcaaaatgtggctttgctgtgtcttgttgcaaagggaaagaaaagcttttgttcagagctttagaaaagtcagttcagtccacataatccattttctccttcaattctgaaaagcagctaatgctcatttggtagtgaagtgctgccgaggaatgttctcttgctccttctttcacaaaattactttatggacaggtttcgaacatgtcactcaacctcaaaacatggtgcaggcttcttggtggatgagcttgcattatctgaggggcggtaggaaagcgtgctcatttttgttgaaaggtttgagtgggatttggcttttgggggaatgtattttagaagctggagaaaatattttttaaattttttccccagaaagccataaaaaagaggattcaggcaattgttaaaataagctatacaaatggtgatgggcatggctgtgtccacaatatctgaaattctacagtcacgtatgatgcctagttgaatcaatacatccagaaaagtgaatatttggtggggaatccaggaaaagaaaaagaaaagcacaattgccataattatcttaaaaatatcatcatttcttggtttgttcttctgaatttcataagccttctttagggccttccaaataagagtataacttgtaagaatgatcagaaaaggaaacaggaaacccagtatatttttggtcaggcccagtcctatcggaagggttgaattttgggactcataatggaaagcacaaactgtaatattggtgttctcaatgaaaaatacatttcgatggattatagctggcaaactggccaagcctgccagcagccaaatgacgatgcaggtgactttggctacaagcattgtgcgtcgaaggcgggacttcattgggtgaacaatagccaggtatcgatcaatgctgagacacgtgagtaggaacacactagcatacaggttgaaactgacgctggctgaagcaatcttacataggtaattgccaaagggccagcggtattccatagctgtgtagacagcccatagtggcaaagtcagtaaaaagcataagtcagccagtgctaaattcaaaagaaaaacactggccacagtcttcagcttcatgtaaaagtaaatgactatcaccaccaagctgtttccaaatattcccaccacaaagatgatactgtataaagtaggaatcatgacaaatatgtaattatgccttccagctttgggacaatcgtcttggattcttttaataccatcttcggtagaagagttgagaatcattttgatctcctgggtcgaatttgtcacaaacactatatcaaatgcacctgatctggtgaagtgtggccagctccaggggcaggcgttgaccagaactacggtcgctctttccttggtcccagagagcttcccagtatagagccagcagttaggacaccgtgacatgaaacttagcaccccacccctgaagtcccccaagcgtgcc

SEQ ID NO: 41 - RNA, 8630 nt, Homo sapiens
  source 1..8630: mol_type = mRNA
aagcatgatggaattttagctgcagtcttcttggtgccagcttatcaatcccaaactctgggtgtaaaagattctacagggcactttcttatgcaaggagctaaacagtgattaaaggagcaggatgaaaagatggcacagtcagtgctggtaccgccaggacctgacagcttccgcttctttaccagggaatcccttgctgctattgaacaacgcattgcagaagagaaagctaagagacccaaacaggaacgcaaggatgaggatgatgaaaatggcccaaagccaaacagtgacttggaagcaggaaaatctcttccatttatttatggagacattcctccagagatggtgtcagtgcccctggaggatctggacccctactatatcaataagaaaacgtttatagtattgaataaagggaaagcaatctctcgattcagtgccacccctgccctttacattttaactcccttcaaccctattagaaaattagctattaagattttggtacattctttattcaatatgctcattatgtgcacgattcttaccaactgtgtatttatgaccatgagtaaccctccagactggacaaagaatgtggagtatacctttacaggaatttatacttttgaatcacttattaaaatacttgcaaggggcttttgtttagaagatttcacatttttacgggatccatggaattggttggatttcacagtcattacttttgcatatgtgacagagtttgtggacctgggcaatgtctcagcgttgagaacattcagagttctccgagcattgaaaacaatttcagtcattccaggcctgaagaccattgtgggggccctgatccagtcagtgaagaagctttctgatgtcatgatcttgactgtgttctgtctaagcgtgtttgcgctaataggattgcagttgttcatgggcaacctacgaaataaatgtttgcaatggcctccagataattcttcctttgaaataaatatcacttccttctttaacaattcattggatgggaatggtactactttcaataggacagtgagcatatttaactgggatgaatatattgaggataaaagtcacttttattttttagaggggcaaaatgatgctctgctttgtggcaacagctcagatgcaggccagtgtcctgaaggatacatctgtgtgaaggctggtagaaaccccaactatggctacacgagctttgacacctttagttgggcctttttgtccttatttcgtctcatgactcaagacttctgggaaaacctttatcaactgacactacgtgctgctgggaaaacgtacatgatattttttgtgctggtcattttcttgggctcattctatctaataaatttgatcttggctgtggtggccatggcctatgaggaacagaatcaggccacattggaagaggctgaacagaaggaagctgaatttcagcagatgctcgaacagttgaaaaagcaacaagaagaagctcaggcggcagctgcagccgcatctgctgaatcaagagacttcagtggtgctggtgggataggagttttttcagagagttcttcagtagcatctaagttgagctccaaaagtgaaaaagagctgaaaaacagaagaaagaaaaagaaacagaaagaacagtctggagaagaagagaaaaatgacagagtccgaaaatcggaatctgaagacagcataagaagaaaaggtttccgtttttccttggaaggaagtaggctgacatatgaaaagagattttcttctccacaccagtccttactgagcatccgtggctcccttttctctccaagacgcaacagtagggcgagccttttcagcttcagaggtcgagcaaaggacattggctctgagaatgactttgctgatgatgagcacagcacctttgaggacaatgacagccgaagagactctctgttcgtgccgcacagacatggagaacggcgccacagcaatgtcagccaggccagccgtgcctccagggtgctccccatcctgcccatgaatgggaagatgcatagcgctgtggactgcaatggtgtggtctccctggtcgggggcccttctaccctcacatctgctgggcagctcctaccagagggcacaactactgaaacagaaataagaaagagacggtccagttcttatcatgtttccatggatttattggaagatcctacatcaaggcaaagagcaatgagtatagccagtattttgaccaacaccatggaagaacttgaagaatccagacagaaatgcccaccatgctggtataaatttgctaatatgtgtttgatttgggactgttgtaaaccatggttaaaggtgaaacaccttgtcaacctggttgtaatggacccatttgttgacctggccatcaccatctgcattgtcttaaatacactcttcatggctatggagcactatcccatgacggagcagttcagcagtgtactgtctgttggaaacctggtcttcacagggatcttcacagcagaaatgtttctcaagataattgccatggatccatattattactttcaagaaggctggaatatttttgatggttttattgtgagccttagtttaatggaacttggtttggcaaatgtggaaggattgtcagttctccgatcattccggctgctccgagttttcaagttggcaaaatcttggccaactctaaatatgctaattaagatcattggcaattctgtgggggctctaggaaacctcaccttggtattggccatcatcgtcttcatttttgctgtggtcggcatgcagctctttggtaagagctacaaagaatgtgtctgcaagatttccaatgattgtgaactcccacgctggcacatgcatgactttttccactccttcctgatcgtgttccgcgtgctgtgtggagagtggatagagaccatgtgggactgtatggaggtcgctggccaaaccatgtgccttactgtcttcatgatggtcatggtgattggaaatctagtggttctgaacctcttcttggccttgcttttgagttccttcagttctgacaatcttgctgccactgatgatgataacgaaatgaataatctccagattgctgtgggaaggatgcagaaaggaatcgattttgttaaaagaaaaatacgtgaatttattcagaaagcctttgttaggaagcagaaagctttagatgaaattaaaccgcttgaagatctaaataataaaaaagacagctgtatttccaaccataccaccatagaaataggcaaagacctcaattatctcaaagacggaaatggaactactagtggcataggcagcagtgtagaaaaatatgtcgtggatgaaagtgattacatgtcatttataaacaaccctagcctcactgtgacagtaccaattgctgttggagaatctgactttgaaaatttaaatactgaagaattcagcagcgagtcagatatggaggaaagcaaagagaagctaaatgcaactagttcatctgaaggcagcacggttgatattggagctcccgccgagggagaacagcctgaggttgaacctgaggaatcccttgaacctgaagcctgttttacagaagactgtgtacggaagttcaagtgttgtcagataagcatagaagaaggcaaagggaaactctggtggaatttgaggaaaacatgctataagatagtggagcacaattggttcgaaaccttcattgtcttcatgattctgctgagcagtggggctctggcctttgaagatatatacattgagcagcgaaaaaccattaagaccatgttagaatatgctgacaaggttttcacttacatattcattctggaaatgctgctaaagtgggttgcatatggttttcaagtgtattttaccaatgcctggtgctggctagacttcctgattgttgatgtctcactggttagcttaactgcaaatgccttgggttactcagaacttggtgccatcaaatccctcagaacactaagagctctgaggccactgagagctttgtcccggtttgaaggaatgagggttgttgtaaatgctcttttaggagccattccatctatcatgaatgtacttctggtttgtctgatcttttggctaatattcagtatcatgggagtgaatctctttgctggcaagttttaccattgtattaattacaccactggagagatgtttgatgtaagcgtggtcaacaactacagtgagtgcaaagctctcattgagagcaatcaaactgccaggtggaaaaatgtgaaagtaaactttgataacgtaggacttggatatctgtctctacttcaagtagccacgtttaagggatggatggatattatgtatgcagctgttgattcacgaaatgtagaattacaacccaagtatgaagacaacctgtacatgtatctttattttgtcatctttattatttttggttcattctttaccttgaatcttttcattggtgtcatcatagataacttcaaccaacagaaaaagaagtttggaggtcaagacatttttatgacagaagaacagaagaaatactacaatgcaatgaaaaaactgggttcaaagaaaccacaaaaacccatacctcgacctgctaacaaattccaaggaatggtctttgattttgtaaccaaacaagtctttgatatcagcatcatgatcctcatctgccttaacatggtcaccatgatggtggaaaccgatgaccagagtcaagaaatgacaaacattctgtactggattaatctggtgtttattgttctgttcactggagaatgtgtgctgaaactgatctctcttcgttactactatttcactattggatggaatatttttgattttgtggtggtcattctctccattgtaggaatgtttctggctgaactgatagaaaagtattttgtgtcccctaccctgttccgagtgatccgtcttgccaggattggccgaatcctacgtctgatcaaaggagcaaaggggatccgcacgctgctctttgctttgatgatgtcccttcctgcgttgtttaacatcggcctccttcttttcctggtcatgttcatctacgccatctttgggatgtccaattttgcctatgttaagagggaagttgggatcgatgacatgttcaactttgagacctttggcaacagcatgatctgcctgttccaaattacaacctctgctggctgggatggattgctagcacctattcttaatagtggacctccagactgtgaccctgacaaagatcaccctggaagctcagttaaaggagactgtgggaacccatctgttgggattttcttttttgtcagttacatcatcatatccttcctggttgtggtgaacatgtacatcgcggtcatcctggagaacttcagtgttgctactgaagaaagtgcagagcctctgagtgaggatgactttgagatgttctatgaggtttgggagaagtttgatcccgatgcgacccagtttatagagtttgccaaactttctgattttgcagatgccctggatcctcctcttctcatagcaaaacccaacaaagtccagctcattgccatggatctgcccatggtgagtggtgaccggatccactgtcttgacatcttatttgcttttacaaagcgtgttttgggtgagagtggagagatggatgcccttcgaatacagatggaagagcgattcatggcatcaaacccctccaaagtctcttatgagcccattacgaccacgttgaaacgcaaacaagaggaggtgtctgctattattatccagagggcttacagacgctacctcttgaagcaaaaagttaaaaaggtatcaagtatatacaagaaagacaaaggcaaagaatgtgatggaacacccatcaaagaagatactctcattgataaactgaatgagaattcaactccagagaaaaccgatatgacgccttccaccacgtctccaccctcgtatgatagtgtgaccaaaccagaaaaagaaaaatttgaaaaagacaaatcagaaaaggaagacaaagggaaagatatcagggaaagtaaaaagtaaaaagaaaccaagaattttccattttgtgatcaattgtttacagcccgtgatggtgatgtgtttgtgtcaacaggactcccacaggaggtctatgccaaactgactgtttttacaaatgtatacttaaggtcagtgcctataacaagacagagacctctggtcagcaaactggaactcagtaaactggagaaatagtatcgatgggaggtttctattttcacaaccagctgacactgctgaagagcagaggcgtaatggctactcagacgataggaaccaatttaaaggggggagggaagttaaatttttatgtaaattcaacatgtgacacttgataatagtaattgtcaccagtgtttatgttttaactgccacacctgccatatttttacaaaacgtgtgctgtgaatttatcacttttctttttaattcacaggttgtttactattatatgtgactatttttgtaaatgggtttgtgtttggggagagggattaaagggagggaattctacatttctctattgtattgtataactggatatattttaaatggaggcatgctgcaattctcattcacacataaaaaaatcacatcacaaaagggaagagtttacttcttgtttcaggatgtttttagatttttgaggtgcttaaatagctattcgtatttttaaggtgtctcatccagaaaaaatttaatgtgcctgtaaatgttccatagaatcacaagcattaaagagttgttttatttttacataacccattaaatgtacatgtatatatgtatatatgtatatgtgcgtgtatatacatatatatgtatacacacatgcacacacagagatatacacataccattacattgtcattcacagtcccagcagcatgactatcacatttttgataagtgtcctttggcataaaataaaaatatcctatcagtcctttctaagaagcctgaattgaccaaaaaacatccccaccaccactttataaagttgattctgctttatcctgcagtattgtttagccatcttctgctcttggtaaggttgacatagtatatgtcaatttaaaaaataaaagtctgctttgtaaatagtaattttacccagtggtgcatgtttgagcaaacaaaaatgatgatttaagcacactacttattgcatcaaatatgtaccacagtaagtatagtttgcaagctttcaacaggtaatatgatgtaattggttccattatagtttgaagctgtcactgctgcatgtttatcttgcctatgctgctgtatcttattccttccactgttcagaagtctaatatgggaagccatatatcagtggtaaagtgaagcaaattgttctaccaagacctcattcttcatgtcattaagcaataggttgcagcaaacaaggaagagcttcttgctttttattcttccaaccttaattgaacactcaatgatgaaaagcccgactgtacaaacatgttgcaagctgcttaaatctgtttaaaatatatggttagagttttctaagaaaatataaatactgtaaaaagttcattttattttatttttcagccttttgtacgtaaaatgagaaattaaaagtatcttcaggtggatgtcacagtcactattgttagtttctgttcctagcacttttaaattgaagcacttcacaaaataagaagcaaggactaggatgcagtgtaggtttctgcttttttattagtactgtaaacttgcacacatttcaatgtgaaacaaatctcaaactgagttcaatgtttatttgctttcaatagtaatgccttatcattgaaagaggcttaaagaaaaaaaaaatcagctgatactcttggcattgcttgaatccaatgtttccacctagtctttttattcagtaatcatcagtcttttccaatgtttgtttacacagatagatcttattgacccatatggcactagaactgtatcagatataatatgggatcccagctttttttcctctcccacaaaaccaggtagtgaagttatattaccagttacagcaaaatactttgtgtttcacaagcaacaataaatgtagattctttatactgaagctattgacttgtagtgtgttggtgaaatgcatgcaggaaaatgctgttaccataaagaacggtaaaccacattacaatcaagccaaaagaataaaggtttcgcttttgtttttgtatttaattgttgtctttgtttctatctttgaaatgccatttaaaggtagatttctatcatgtaaaaataatctatctgaaaaacaaatgtaaagaacacacattaattactataattcatctttcaattttttcatggaatggaagttaattaagaagagtgtattggataactactttaatattggccaaaaagctagatatggcatcaggtagactagtggaaagttacaaaaattaataaaaaattgactaaca

SEQ ID NO: 42 - RNA, 8630 nt, Homo sapiens
  source 1..8630: mol_type = mRNA
tgttagtcaattttttattaatttttgtaactttccactagtctacctgatgccatatctagctttttggccaatattaaagtagttatccaatacactcttcttaattaacttccattccatgaaaaaattgaaagatgaattatagtaattaatgtgtgttctttacatttgtttttcagatagattatttttacatgatagaaatctacctttaaatggcatttcaaagatagaaacaaagacaacaattaaatacaaaaacaaaagcgaaacctttattcttttggcttgattgtaatgtggtttaccgttctttatggtaacagcattttcctgcatgcatttcaccaacacactacaagtcaatagcttcagtataaagaatctacatttattgttgcttgtgaaacacaaagtattttgctgtaactggtaatataacttcactacctggttttgtgggagaggaaaaaaagctgggatcccatattatatctgatacagttctagtgccatatgggtcaataagatctatctgtgtaaacaaacattggaaaagactgatgattactgaataaaaagactaggtggaaacattggattcaagcaatgccaagagtatcagctgattttttttttctttaagcctctttcaatgataaggcattactattgaaagcaaataaacattgaactcagtttgagatttgtttcacattgaaatgtgtgcaagtttacagtactaataaaaaagcagaaacctacactgcatcctagtccttgcttcttattttgtgaagtgcttcaatttaaaagtgctaggaacagaaactaacaatagtgactgtgacatccacctgaagatacttttaatttctcattttacgtacaaaaggctgaaaaataaaataaaatgaactttttacagtatttatattttcttagaaaactctaaccatatattttaaacagatttaagcagcttgcaacatgtttgtacagtcgggcttttcatcattgagtgttcaattaaggttggaagaataaaaagcaagaagctcttccttgtttgctgcaacctattgcttaatgacatgaagaatgaggtcttggtagaacaatttgcttcactttaccactgatatatggcttcccatattagacttctgaacagtggaaggaataagatacagcagcataggcaagataaacatgcagcagtgacagcttcaaactataatggaaccaattacatcatattacctgttgaaagcttgcaaactatacttactgtggtacatatttgatgcaataagtagtgtgcttaaatcatcatttttgtttgctcaaacatgcaccactgggtaaaattactatttacaaagcagacttttattttttaaattgacatatactatgtcaaccttaccaagagcagaagatggctaaacaatactgcaggataaagcagaatcaactttataaagtggtggtggggatgttttttggtcaattcaggcttcttagaaaggactgataggatatttttattttatgccaaaggacacttatcaaaaatgtgatagtcatgctgctgggactgtgaatgacaatgtaatggtatgtgtatatctctgtgtgtgcatgtgtgtatacatatatatgtatatacacgcacatatacatatatacatatatacatgtacatttaatgggttatgtaaaaataaaacaactctttaatgcttgtgattctatggaacatttacaggcacattaaattttttctggatgagacaccttaaaaatacgaatagctatttaagcacctcaaaaatctaaaaacatcctgaaacaagaagtaaactcttcccttttgtgatgtgatttttttatgtgtgaatgagaattgcagcatgcctccatttaaaatatatccagttatacaatacaatagagaaatgtagaattccctccctttaatccctctccccaaacacaaacccatttacaaaaatagtcacatataatagtaaacaacctgtgaattaaaaagaaaagtgataaattcacagcacacgttttgtaaaaatatggcaggtgtggcagttaaaacataaacactggtgacaattactattatcaagtgtcacatgttgaatttacataaaaatttaacttccctcccccctttaaattggttcctatcgtctgagtagccattacgcctctgctcttcagcagtgtcagctggttgtgaaaatagaaacctcccatcgatactatttctccagtttactgagttccagtttgctgaccagaggtctctgtcttgttataggcactgaccttaagtatacatttgtaaaaacagtcagtttggcatagacctcctgtgggagtcctgttgacacaaacacatcaccatcacgggctgtaaacaattgatcacaaaatggaaaattcttggtttctttttactttttactttccctgatatctttccctttgtcttccttttctgatttgtctttttcaaatttttctttttctggtttggtcacactatcatacgagggtggagacgtggtggaaggcgtcatatcggttttctctggagttgaattctcattcagtttatcaatgagagtatcttctttgatgggtgttccatcacattctttgcctttgtctttcttgtatatacttgatacctttttaactttttgcttcaagaggtagcgtctgtaagccctctggataataatagcagacacctcctcttgtttgcgtttcaacgtggtcgtaatgggctcataagagactttggaggggtttgatgccatgaatcgctcttccatctgtattcgaagggcatccatctctccactctcacccaaaacacgctttgtaaaagcaaataagatgtcaagacagtggatccggtcaccactcaccatgggcagatccatggcaatgagctggactttgttgggttttgctatgagaagaggaggatccagggcatctgcaaaatcagaaagtttggcaaactctataaactgggtcgcatcgggatcaaacttctcccaaacctcatagaacatctcaaagtcatcctcactcagaggctctgcactttcttcagtagcaacactgaagttctccaggatgaccgcgatgtacatgttcaccacaaccaggaaggatatgatgatgtaactgacaaaaaagaaaatcccaacagatgggttcccacagtctcctttaactgagcttccagggtgatctttgtcagggtcacagtctggaggtccactattaagaataggtgctagcaatccatcccagccagcagaggttgtaatttggaacaggcagatcatgctgttgccaaaggtctcaaagttgaacatgtcatcgatcccaacttccctcttaacataggcaaaattggacatcccaaagatggcgtagatgaacatgaccaggaaaagaaggaggccgatgttaaacaacgcaggaagggacatcatcaaagcaaagagcagcgtgcggatcccctttgctcctttgatcagacgtaggattcggccaatcctggcaagacggatcactcggaacagggtaggggacacaaaatacttttctatcagttcagccagaaacattcctacaatggagagaatgaccaccacaaaatcaaaaatattccatccaatagtgaaatagtagtaacgaagagagatcagtttcagcacacattctccagtgaacagaacaataaacaccagattaatccagtacagaatgtttgtcatttcttgactctggtcatcggtttccaccatcatggtgaccatgttaaggcagatgaggatcatgatgctgatatcaaagacttgtttggttacaaaatcaaagaccattccttggaatttgttagcaggtcgaggtatgggtttttgtggtttctttgaacccagttttttcattgcattgtagtatttcttctgttcttctgtcataaaaatgtcttgacctccaaacttctttttctgttggttgaagttatctatgatgacaccaatgaaaagattcaaggtaaagaatgaaccaaaaataataaagatgacaaaataaagatacatgtacaggttgtcttcatacttgggttgtaattctacatttcgtgaatcaacagctgcatacataatatccatccatcccttaaacgtggctacttgaagtagagacagatatccaagtcctacgttatcaaagtttactttcacatttttccacctggcagtttgattgctctcaatgagagctttgcactcactgtagttgttgaccacgcttacatcaaacatctctccagtggtgtaattaatacaatggtaaaacttgccagcaaagagattcactcccatgatactgaatattagccaaaagatcagacaaaccagaagtacattcatgatagatggaatggctcctaaaagagcatttacaacaaccctcattccttcaaaccgggacaaagctctcagtggcctcagagctcttagtgttctgagggatttgatggcaccaagttctgagtaacccaaggcatttgcagttaagctaaccagtgagacatcaacaatcaggaagtctagccagcaccaggcattggtaaaatacacttgaaaaccatatgcaacccactttagcagcatttccagaatgaatatgtaagtgaaaaccttgtcagcatattctaacatggtcttaatggtttttcgctgctcaatgtatatatcttcaaaggccagagccccactgctcagcagaatcatgaagacaatgaaggtttcgaaccaattgtgctccactatcttatagcatgttttcctcaaattccaccagagtttccctttgccttcttctatgcttatctgacaacacttgaacttccgtacacagtcttctgtaaaacaggcttcaggttcaagggattcctcaggttcaacctcaggctgttctccctcggcgggagctccaatatcaaccgtgctgccttcagatgaactagttgcatttagcttctctttgctttcctccatatctgactcgctgctgaattcttcagtatttaaattttcaaagtcagattctccaacagcaattggtactgtcacagtgaggctagggttgtttataaatgacatgtaatcactttcatccacgacatatttttctacactgctgcctatgccactagtagttccatttccgtctttgagataattgaggtctttgcctatttctatggtggtatggttggaaatacagctgtcttttttattatttagatcttcaagcggtttaatttcatctaaagctttctgcttcctaacaaaggctttctgaataaattcacgtatttttcttttaacaaaatcgattcctttctgcatccttcccacagcaatctggagattattcatttcgttatcatcatcagtggcagcaagattgtcagaactgaaggaactcaaaagcaaggccaagaagaggttcagaaccactagatttccaatcaccatgaccatcatgaagacagtaaggcacatggtttggccagcgacctccatacagtcccacatggtctctatccactctccacacagcacgcggaacacgatcaggaaggagtggaaaaagtcatgcatgtgccagcgtgggagttcacaatcattggaaatcttgcagacacattctttgtagctcttaccaaagagctgcatgccgaccacagcaaaaatgaagacgatgatggccaataccaaggtgaggtttcctagagcccccacagaattgccaatgatcttaattagcatatttagagttggccaagattttgccaacttgaaaactcggagcagccggaatgatcggagaactgacaatccttccacatttgccaaaccaagttccattaaactaaggctcacaataaaaccatcaaaaatattccagccttcttgaaagtaataatatggatccatggcaattatcttgagaaacatttctgctgtgaagatccctgtgaagaccaggtttccaacagacagtacactgctgaactgctccgtcatgggatagtgctccatagccatgaagagtgtatttaagacaatgcagatggtgatggccaggtcaacaaatgggtccattacaaccaggttgacaaggtgtttcacctttaaccatggtttacaacagtcccaaatcaaacacatattagcaaatttataccagcatggtgggcatttctgtctggattcttcaagttcttccatggtgttggtcaaaatactggctatactcattgctctttgccttgatgtaggatcttccaataaatccatggaaacatgataagaactggaccgtctctttcttatttctgtttcagtagttgtgccctctggtaggagctgcccagcagatgtgagggtagaagggcccccgaccagggagaccacaccattgcagtccacagcgctatgcatcttcccattcatgggcaggatggggagcaccctggaggcacggctggcctggctgacattgctgtggcgccgttctccatgtctgtgcggcacgaacagagagtctcttcggctgtcattgtcctcaaaggtgctgtgctcatcatcagcaaagtcattctcagagccaatgtcctttgctcgacctctgaagctgaaaaggctcgccctactgttgcgtcttggagagaaaagggagccacggatgctcagtaaggactggtgtggagaagaaaatctcttttcatatgtcagcctacttccttccaaggaaaaacggaaaccttttcttcttatgctgtcttcagattccgattttcggactctgtcatttttctcttcttctccagactgttctttctgtttctttttctttcttctgtttttcagctctttttcacttttggagctcaacttagatgctactgaagaactctctgaaaaaactcctatcccaccagcaccactgaagtctcttgattcagcagatgcggctgcagctgccgcctgagcttcttcttgttgctttttcaactgttcgagcatctgctgaaattcagcttccttctgttcagcctcttccaatgtggcctgattctgttcctcataggccatggccaccacagccaagatcaaatttattagatagaatgagcccaagaaaatgaccagcacaaaaaatatcatgtacgttttcccagcagcacgtagtgtcagttgataaaggttttcccagaagtcttgagtcatgagacgaaataaggacaaaaaggcccaactaaaggtgtcaaagctcgtgtagccatagttggggtttctaccagccttcacacagatgtatccttcaggacactggcctgcatctgagctgttgccacaaagcagagcatcattttgcccctctaaaaaataaaagtgacttttatcctcaatatattcatcccagttaaatatgctcactgtcctattgaaagtagtaccattcccatccaatgaattgttaaagaaggaagtgatatttatttcaaaggaagaattatctggaggccattgcaaacatttatttcgtaggttgcccatgaacaactgcaatcctattagcgcaaacacgcttagacagaacacagtcaagatcatgacatcagaaagcttcttcactgactggatcagggcccccacaatggtcttcaggcctggaatgactgaaattgttttcaatgctcggagaactctgaatgttctcaacgctgagacattgcccaggtccacaaactctgtcacatatgcaaaagtaatgactgtgaaatccaaccaattccatggatcccgtaaaaatgtgaaatcttctaaacaaaagccccttgcaagtattttaataagtgattcaaaagtataaattcctgtaaaggtatactccacattctttgtccagtctggagggttactcatggtcataaatacacagttggtaagaatcgtgcacataatgagcatattgaataaagaatgtaccaaaatcttaatagctaattttctaatagggttgaagggagttaaaatgtaaagggcaggggtggcactgaatcgagagattgctttccctttattcaatactataaacgttttcttattgatatagtaggggtccagatcctccaggggcactgacaccatctctggaggaatgtctccataaataaatggaagagattttcctgcttccaagtcactgtttggctttgggccattttcatcatcctcatccttgcgttcctgtttgggtctcttagctttctcttctgcaatgcgttgttcaatagcagcaagggattccctggtaaagaagcggaagctgtcaggtcctggcggtaccagcactgactgtgccatcttttcatcctgctcctttaatcactgtttagctccttgcataagaaagtgccctgtagaatcttttacacccagagtttgggattgataagctggcaccaagaagactgcagctaaaattccatcatgctt

SEQ ID NO: 43 - RNA, 8819 nt, Mus musculus
  source 1..8819: mol_type = mRNA
ggtgtggtctttaaaggagaatttgaaaaaaaaaaaaatttttttttttttaaagcctgatggaattttagctgcagtcttcttgcttccagcctatcaacccaaaactctgtaacagcttcttcagggcactttcttatgcgaggagctaaacagtgattaaagaagcaggatgaaaagatggcacaatcagtgctggtaccgccaggacctgacagcttccgcttctttaccagggaatcccttgctgctattgaacaacgcattgcagaagagaaagctaagagacccaaacaggaacgcaaggacgaagacgacgaaaatggcccaaagccaaatagtgacttggaagcaggaaaatcccttccttttatttatggagacattcctccagagatggtgtcagagcccctggaggacctggacccctactatatcaataagaaaacctttatagtattgaataaagggaaagcaatctctcggttcagtgccacctccgccctgtacattttaactcccttcaaccccattagaaaattagctattaagattttggtacattctttattcaatgtgcttatcatgtgcacaattcttaccaactgtgtatttatgaccatgagcaaccctccagactggacaaagaatgtggagtatacttttacaggaatttatacttttgaatcacttattaaaatacttgcaaggggcttttgtctagaagatttcacatttctacgggatccctggaactggctggatttcacagtcattacctttgcgtatgtaacagaatttgtaaacctaggcaatgtttcagctcttcgaactttcagagtcttgagagctttgaaaactatttctgtaattccaggcctgaagaccatcgtgggggccctgatccagtcggtgaagaagctgtctgacgtcatgatactcactgtgttctgtctgagtgtctttgctctcatcgggctgcagctcttcatgggcaacctgaggaataaatgcttgcagtggcccccagacaattctacctttgaaataaacatcacttccttctttaataactcattggattggaatggtactgccttcaataggacaatgaacatgtttaactgggatgaatatattgaagataaaagtcacttttattttttggaaggacaaaacgatgctctgctttgtggtaacagctcggatgctggccagtgtccggaaggatacatctgtgtgaaggctgggagaaaccccaactatggctacacgagttttgacaccttcagctgggccttcttgtccttatttcgtcttatgactcaagacttctgggaaaacctttatcagctgaccttgcgtgctgctgggaaaacatatatgatatttttcgtgcttgtgattttcttgggctcattctacctaataaatttgatcctggctgtggtggccatggcctatgaagaacagaaccaggccacgctggaggaagctgaacagaaggaggcagagtttcagcagatgctggagcaacttaagaagcagcaagaagaagctcaggcagcagctgcagcagcgtctgcagaatccagagacttcagtggagcaggtgggataggtgttttctcggagagttcttccgtagcttcaaagttaagttccaagagtgaaaaggagctgaaaaacagaaggaagaaaaagaaacagaaagagcaggctggagaggaagagaaggaagatgctgtgcggaaatctgcctctgaagacagcatacgaaagaaaggcttccggttttccctagaagggagtagactgacctacgagaagaggttttcctctccacaccagtctctcttgagcatccgaggctcccttttttctccgagacgcaacagtagagcaagccttttcagcttcaaaggtcgggtgaaggatattggttctgaaaatgactttgcggacgatgaacacagcacgtttgaggacaacgacagcaggagagactctctatttgtaccacacagacatggagaaaggcgtcccagcaacgttagccaggccagccgtgcctcccgggggatacccactctacccatgaatgggaagatgcacagtgcagtggactgcaacggtgtggtctccctagttggaggcccttctgctctcacatctcctgtggggcagctactaccagagggcacaactactgaaacagaaataaggaagaggaggtccagttcttaccatgtttctatggacttgttggaagaccctacatcaaggcaaagagcaatgagtatggccagcattttgaccaacactatggaagaacttgaagaatccagacagaaatgccctccatgctggtataaatttgctaatatgtgcctgatttgggactgttgtaagccatggctaaaggtaaaacatgttgtcaatctggtagtgatggatccattcgttgacctggccatcaccatctgcattgtgttaaatacactcttcatggccatggagcactacccgatgacggagcagttcagcagtgtgctgtctgttgggaatttggtcttcactgggatcttcaccgcagaaatgtttctcaagataatagccatggatccatattattactttcaagaaggctggaatatctttgatggctttatagtgagccttagtttaatggaactcggcttggcgaatgtggaaggactgtcagttctccgatctttccgactgcttagagtcttcaagttggcaaaatcctggcccacactgaatatgctcattaagatcatcggcaactcggtgggcgcgctgggcaacctgaccctggtgctggccatcatcgtcttcatttttgccgtggtcggcatgcagctgtttggaaagagctacaaggagtgtgtttgcaagatttccaatgattgtgagctgccgcgctggcacatgcatgacttcttccactcgttcctgatcgtgttccgcgtgctgtgtggggagtggatagagaccatgtgggactgcatggaggtcgcaggccagaccatgtgtcttactgtcttcatgatggtcatggtgattgggaaccttgtcgttctgaacctcttcttggccttgctcctcagttctttcagctcggacaacctggctgccacagatgacgataacgaaatgaacaacctccagatagccgtgggaaggatgcagaaggggattgattttgttaaaaggaagatacgtgaattcattcagaaagcctttgtcagaaagcagaaagctctagatgaaatcaaaccccttgaagatctgaataacaagaaagacagttgtatctccaaccacacaaccatagaaataggcaaggacctgaattacctcaaagatggaaacgggacgaccagtggcataggcagcagtgtggagaagtacgtggtagatgagagtgattacatgtcattcatcaacaaccccagcctcaccgtgactgtgcccattgctgtgggagagtctgactttgaaaacttaaatacagaagaattcagcagtgaatcagatatggaagaaagcaaggagaaattgaatgcaactagttcatctgaaggcagtacagttgatataggtgctcctgcagagggagagcaaccagaggccgaaccagaagagtcccttgagccagaagcctgtttcacagaagactgtgtaagaaagttcaagtgttgtcagataagcatagaagaaggcaaaggcaaactctggtggaacttgaggaaaacctgctacaagatagtagagcacaactggtttgaaaccttcatcgtcttcatgattctgctcagcagcggtgctctggcctttgaagacatttacatcgagcagcgaaaaaccatcaagaccatgctggagtatgctgacaaggtcttcacttacatcttcatcctggagatgttgctaaagtgggttgcatatggtttccaaatgtacttcaccaatgcctggtgctggctggacttcctgatcgttgatgtctcactggttagcttaactgcaaatgccttgggctattcagaacttggtgccatcaaatccctccgaacattaagagcactgaggcctctacgagccttatcccgatttgaaggaatgagggttgttgtaaacgctctcctaggtgcaatcccatccataatgaacgtacttctggtctgcctgatcttttggctaatattcagtatcatgggggtgaatctctttgccggcaagttctatcattgcatcaactacaccaccggggaaatgtttgatgtgagcgtggtcaacaactacagtgagtgccaggctctcatagagagcaatcagacagccaggtggaagaatgtgaaagtcaactttgacaacgtgggacttggatatctttctctgcttcaagtagccacatttaaaggatggatggatatcatgtatgcagctgttgactcaagaaatgtagaactgcaacccaaatatgaagacaatctatacatgtacctttactttgtcatctttattattttcggctcattcttcacactgaacctgttcatcggcgtcatcatagataacttcaaccaacagaagaagaagtttggaggtcaagacatttttatgacagaagaacagaagaaatactacaatgcaatgaagaagctaggctcaaagaaaccacaaaaaccgatacctcgccctgctaacaagtttcaagggatggtctttgattttgtaaccaaacaagtgtttgacatcagcatcatgatcctcatctgcctcaacatggtgaccatgatggtggaaacggacgaccagagccaagagatgaccaacatcctgtattggatcaacctggtgttcatcgtcctgttcaccggcgagtgtgtgctcaagcttatctcactccgtcattattatttcaccattggatggaacatttttgattttgtggtggtcatcctctccattgtagggatgtttctcgcggagctgatagagaagtatttcgtgtcccctaccctgttccgagtcatccgcctggccaggattggacgaatcctacgcctgatcaaaggcgccaaggggatccgcacgctgctctttgctctgatgatgtcccttcctgcgctgtttaacatcggcctcctgcttttcctggtcatgttcatctacgccatctttgggatgtccaactttgcctacgttaagagggaagttgggattgatgacatgttcaactttgagacctttggcaacagcatgatctgcctgttccaaatcaccacttctgcgggctgggatggactgctggcccctatactaaatagtggacctcccgattgtgaccctgaaaaagatcatcctggaagctcggtgaagggagactgtgggaacccatctgtggggattttcttttttgtcagctacatcatcatatccttcctggttgtggtgaacatgtacattgctgtcatcctggagaacttcagcgttgccacagaagaaagtgcagagcctctgagtgaggacgactttgagatgttctacgaagtctgggagaagttcgaccctgacgccacccagttcatagagttctgcaagctctctgactttgcagctgccctggatcctcccctcctcatcgcaaagccaaacaaagtgcagctcattgccatggacctgcccatggtgagtggagaccgcatccactgcctggacatcttatttgcttttacaaagcgggtcctgggtgagagtggagagatggatgctcttcgaatccagatggaagagcggttcatggcttccaatccctccaaggtctcttatgagcccattaccaccactctgaagcgcaaacaagaggaggtgtctgctattgtcatccagcgagcttacagacgctatcttctgaaacagaaagttaagaaggtttcgtctatatataaaaaagacaagggtaaagaagatgagggaacgcccatcaaagaagacatcatcacggataaactgaatgagaattcaactccagagaagactgacgtgacaccctccaccacttcgccaccttcctacgatagcgtgaccaaaccggagaaggaaaaatttgaaaaggacaaatcagaaaaagaggacaaggggaaagatatcagggaaagtaaaaagtaaaaaaataaaaaattaatgaaaattaaaaattaaaaaaaaaagaatattccattttgtgatcaactgtttacagcctgtgttggtgatgtatctgcgactccctcaggaggtctatgccaaactgactgtttctataagtgtatacttaaggtcagtgcctataaccagacaggacctcgggtcagcaaagtgggactcgccaaaccagacaaagagcaccgacaggaggcttctgttttcgcaaccagctgacactgctgaagagtggaggagagcaatggctactcagaccagaggaacatttggaaatggggaggaaagttaaatttttatgtaaatttaacatgtgacacttgatagcattaactgtcaccaccgtttgtgttttaactgccacacctgccatatttttacaaaatgtgtgctgtgactttatcaccttttttttttttttaattcacgggttgtttactcttatatgtgactatttttgtaactgggtttacgtttggggagagggattaaggaggggatactacatttctctgtgtataatgagatctattttcaatgaaggcatgctgcagttttcatccacacatgacaatatcccatcacacacggaaagggtatacttctcatttcaggatgtttttagattttttgaggtgcttaaatagctattcatatttttaaggtgtttcatccagaagaattttaatgtgcctgtaaatgttccatagagtcacaaccatcaaagagttgttttatttttacatagttcattatatgtacatgtatatatgtatatatgtatatggccgtgtatatacatatatatgtatacacacatgcatacatatgcacacacagaccatcacatgctcagagtccaggcagcatgactataacattttttgataagtgtcctttggtaaaaaaaaaaaaaaagtatatatatatatatatcctctcagtcctttctaagaaacccaaactaccaaaaaccatccccacagccactttctgaagttggttctgctttttttcctgcagtattgtttagccatcttctgctcttggtaaggttgacatagtgtatgtcaattaaaacaaaacaaaacaaaacaaaagtctgctttgtaaatagtaattttacccagtggtgcatgtttgagccaacgaaaatgatttaagcacagtatttactgcatcaaatatgtaccacagttaagtatagtttgcaagctttcaacaggtgacatgacgtcattggttcccttagagtttgaagctgtcactgctgcatgtctctcttgctgctgctgctgtatcttaacccttctgctgttcagaagtctaatagggaagccatatgtcagaggtggagtgaagtggattgttccatcaggaactcaatcttcacgacactgagcaatgtgttgcagtaaacaaggaagaaatccctgctctttgttctccctacccttaattgaacactccggtgagatgtctgacagtgtaaacaagtggcaagctacttagatctgttgaaggtatatggttagagttttctaagaaatatacatattgtaaaaaaaaatggggggagttcagtttattttatttcgaagccttttgtacataaaatgggaaattaaaagtatcttcaggttgatgtcacagtcctatcattagtttctgttcccggcactttttaattaaggcactccgccaaggaagagagagataaggcctaagaggcagtacagggctctgctgtcattgttggtactgtggacttgcacatatttccacttgaaacaattctcattccaagtctaatgtccatttgctttcaatagtgatgccttatcattgacaagagatttcaaggggagcagatgatagatactctaggcattatctgagtgggatgtactcacctagccttcccctccattcatccatcttcttaatgttcgtttatacagatagatggatagatagaatcttactgacccacatggcactagagctgtatcagatatgatttgggaaccaagttttcttctctctctctctctctctctctctctctctctctctctctctctctctctctctctctctttctctcactgttttccaccaaaccagttagtgaaatgatcttgccaatcacaaacgttttgtttcacaaaaacaaccttcattgtagatcctttatactaaagctgttgatttgtagtgtgttgaatgcatgcgggaaaatgctatgaccatacagagctaccggtaagccacattacaatcaagccaaaagaataaagatttttttttttgcttttgtttctgtatttattgttttgtctgtgtttctatcctcgagatgccagttagaggtaaatttctatcgtgtaaaaatgatctatctgaaaattttaaatgtaaaaagtacgcattaagtataataattcatctttaaatttttcatggaatggaaactgagaagaatgtattggatatctagttttaatattggccaaaatccacagatatggtaccaggtagagtagtggaaagttacaaaaaattaataaaaaaattgactaaca

SEQ ID NO: 44 - RNA, 8819 nt, Mus musculus
  source 1..8819: mol_type = mRNA
tgttagtcaatttttttattaattttttgtaactttccactactctacctggtaccatatctgtggattttggccaatattaaaactagatatccaatacattcttctcagtttccattccatgaaaaatttaaagatgaattattatacttaatgcgtactttttacatttaaaattttcagatagatcatttttacacgatagaaatttacctctaactggcatctcgaggatagaaacacagacaaaacaataaatacagaaacaaaagcaaaaaaaaaaatctttattcttttggcttgattgtaatgtggcttaccggtagctctgtatggtcatagcattttcccgcatgcattcaacacactacaaatcaacagctttagtataaaggatctacaatgaaggttgtttttgtgaaacaaaacgtttgtgattggcaagatcatttcactaactggtttggtggaaaacagtgagagaaagagagagagagagagagagagagagagagagagagagagagagagagagagagagagagaagaaaacttggttcccaaatcatatctgatacagctctagtgccatgtgggtcagtaagattctatctatccatctatctgtataaacgaacattaagaagatggatgaatggaggggaaggctaggtgagtacatcccactcagataatgcctagagtatctatcatctgctccccttgaaatctcttgtcaatgataaggcatcactattgaaagcaaatggacattagacttggaatgagaattgtttcaagtggaaatatgtgcaagtccacagtaccaacaatgacagcagagccctgtactgcctcttaggccttatctctctcttccttggcggagtgccttaattaaaaagtgccgggaacagaaactaatgataggactgtgacatcaacctgaagatacttttaatttcccattttatgtacaaaaggcttcgaaataaaataaactgaactccccccatttttttttacaatatgtatatttcttagaaaactctaaccatataccttcaacagatctaagtagcttgccacttgtttacactgtcagacatctcaccggagtgttcaattaagggtagggagaacaaagagcagggatttcttccttgtttactgcaacacattgctcagtgtcgtgaagattgagttcctgatggaacaatccacttcactccacctctgacatatggcttccctattagacttctgaacagcagaagggttaagatacagcagcagcagcaagagagacatgcagcagtgacagcttcaaactctaagggaaccaatgacgtcatgtcacctgttgaaagcttgcaaactatacttaactgtggtacatatttgatgcagtaaatactgtgcttaaatcattttcgttggctcaaacatgcaccactgggtaaaattactatttacaaagcagacttttgttttgttttgttttgttttaattgacatacactatgtcaaccttaccaagagcagaagatggctaaacaatactgcaggaaaaaaagcagaaccaacttcagaaagtggctgtggggatggtttttggtagtttgggtttcttagaaaggactgagaggatatatatatatatatactttttttttttttttaccaaaggacacttatcaaaaaatgttatagtcatgctgcctggactctgagcatgtgatggtctgtgtgtgcatatgtatgcatgtgtgtatacatatatatgtatatacacggccatatacatatatacatatatacatgtacatataatgaactatgtaaaaataaaacaactctttgatggttgtgactctatggaacatttacaggcacattaaaattcttctggatgaaacaccttaaaaatatgaatagctatttaagcacctcaaaaaatctaaaaacatcctgaaatgagaagtataccctttccgtgtgtgatgggatattgtcatgtgtggatgaaaactgcagcatgccttcattgaaaatagatctcattatacacagagaaatgtagtatcccctccttaatccctctccccaaacgtaaacccagttacaaaaatagtcacatataagagtaaacaacccgtgaattaaaaaaaaaaaaaaggtgataaagtcacagcacacattttgtaaaaatatggcaggtgtggcagttaaaacacaaacggtggtgacagttaatgctatcaagtgtcacatgttaaatttacataaaaatttaactttcctccccatttccaaatgttcctctggtctgagtagccattgctctcctccactcttcagcagtgtcagctggttgcgaaaacagaagcctcctgtcggtgctctttgtctggtttggcgagtcccactttgctgacccgaggtcctgtctggttataggcactgaccttaagtatacacttatagaaacagtcagtttggcatagacctcctgagggagtcgcagatacatcaccaacacaggctgtaaacagttgatcacaaaatggaatattcttttttttttaatttttaattttcattaattttttatttttttactttttactttccctgatatctttccccttgtcctctttttctgatttgtccttttcaaatttttccttctccggtttggtcacgctatcgtaggaaggtggcgaagtggtggagggtgtcacgtcagtcttctctggagttgaattctcattcagtttatccgtgatgatgtcttctttgatgggcgttccctcatcttctttacccttgtcttttttatatatagacgaaaccttcttaactttctgtttcagaagatagcgtctgtaagctcgctggatgacaatagcagacacctcctcttgtttgcgcttcagagtggtggtaatgggctcataagagaccttggagggattggaagccatgaaccgctcttccatctggattcgaagagcatccatctctccactctcacccaggacccgctttgtaaaagcaaataagatgtccaggcagtggatgcggtctccactcaccatgggcaggtccatggcaatgagctgcactttgtttggctttgcgatgaggaggggaggatccagggcagctgcaaagtcagagagcttgcagaactctatgaactgggtggcgtcagggtcgaacttctcccagacttcgtagaacatctcaaagtcgtcctcactcagaggctctgcactttcttctgtggcaacgctgaagttctccaggatgacagcaatgtacatgttcaccacaaccaggaaggatatgatgatgtagctgacaaaaaagaaaatccccacagatgggttcccacagtctcccttcaccgagcttccaggatgatctttttcagggtcacaatcgggaggtccactatttagtataggggccagcagtccatcccagcccgcagaagtggtgatttggaacaggcagatcatgctgttgccaaaggtctcaaagttgaacatgtcatcaatcccaacttccctcttaacgtaggcaaagttggacatcccaaagatggcgtagatgaacatgaccaggaaaagcaggaggccgatgttaaacagcgcaggaagggacatcatcagagcaaagagcagcgtgcggatccccttggcgcctttgatcaggcgtaggattcgtccaatcctggccaggcggatgactcggaacagggtaggggacacgaaatacttctctatcagctccgcgagaaacatccctacaatggagaggatgaccaccacaaaatcaaaaatgttccatccaatggtgaaataataatgacggagtgagataagcttgagcacacactcgccggtgaacaggacgatgaacaccaggttgatccaatacaggatgttggtcatctcttggctctggtcgtccgtttccaccatcatggtcaccatgttgaggcagatgaggatcatgatgctgatgtcaaacacttgtttggttacaaaatcaaagaccatcccttgaaacttgttagcagggcgaggtatcggtttttgtggtttctttgagcctagcttcttcattgcattgtagtatttcttctgttcttctgtcataaaaatgtcttgacctccaaacttcttcttctgttggttgaagttatctatgatgacgccgatgaacaggttcagtgtgaagaatgagccgaaaataataaagatgacaaagtaaaggtacatgtatagattgtcttcatatttgggttgcagttctacatttcttgagtcaacagctgcatacatgatatccatccatcctttaaatgtggctacttgaagcagagaaagatatccaagtcccacgttgtcaaagttgactttcacattcttccacctggctgtctgattgctctctatgagagcctggcactcactgtagttgttgaccacgctcacatcaaacatttccccggtggtgtagttgatgcaatgatagaacttgccggcaaagagattcacccccatgatactgaatattagccaaaagatcaggcagaccagaagtacgttcattatggatgggattgcacctaggagagcgtttacaacaaccctcattccttcaaatcgggataaggctcgtagaggcctcagtgctcttaatgttcggagggatttgatggcaccaagttctgaatagcccaaggcatttgcagttaagctaaccagtgagacatcaacgatcaggaagtccagccagcaccaggcattggtgaagtacatttggaaaccatatgcaacccactttagcaacatctccaggatgaagatgtaagtgaagaccttgtcagcatactccagcatggtcttgatggtttttcgctgctcgatgtaaatgtcttcaaaggccagagcaccgctgctgagcagaatcatgaagacgatgaaggtttcaaaccagttgtgctctactatcttgtagcaggttttcctcaagttccaccagagtttgcctttgccttcttctatgcttatctgacaacacttgaactttcttacacagtcttctgtgaaacaggcttctggctcaagggactcttctggttcggcctctggttgctctccctctgcaggagcacctatatcaactgtactgccttcagatgaactagttgcattcaatttctccttgctttcttccatatctgattcactgctgaattcttctgtatttaagttttcaaagtcagactctcccacagcaatgggcacagtcacggtgaggctggggttgttgatgaatgacatgtaatcactctcatctaccacgtacttctccacactgctgcctatgccactggtcgtcccgtttccatctttgaggtaattcaggtccttgcctatttctatggttgtgtggttggagatacaactgtctttcttgttattcagatcttcaaggggtttgatttcatctagagctttctgctttctgacaaaggctttctgaatgaattcacgtatcttccttttaacaaaatcaatccccttctgcatccttcccacggctatctggaggttgttcatttcgttatcgtcatctgtggcagccaggttgtccgagctgaaagaactgaggagcaaggccaagaagaggttcagaacgacaaggttcccaatcaccatgaccatcatgaagacagtaagacacatggtctggcctgcgacctccatgcagtcccacatggtctctatccactccccacacagcacgcggaacacgatcaggaacgagtggaagaagtcatgcatgtgccagcgcggcagctcacaatcattggaaatcttgcaaacacactccttgtagctctttccaaacagctgcatgccgaccacggcaaaaatgaagacgatgatggccagcaccagggtcaggttgcccagcgcgcccaccgagttgccgatgatcttaatgagcatattcagtgtgggccaggattttgccaacttgaagactctaagcagtcggaaagatcggagaactgacagtccttccacattcgccaagccgagttccattaaactaaggctcactataaagccatcaaagatattccagccttcttgaaagtaataatatggatccatggctattatcttgagaaacatttctgcggtgaagatcccagtgaagaccaaattcccaacagacagcacactgctgaactgctccgtcatcgggtagtgctccatggccatgaagagtgtatttaacacaatgcagatggtgatggccaggtcaacgaatggatccatcactaccagattgacaacatgttttacctttagccatggcttacaacagtcccaaatcaggcacatattagcaaatttataccagcatggagggcatttctgtctggattcttcaagttcttccatagtgttggtcaaaatgctggccatactcattgctctttgccttgatgtagggtcttccaacaagtccatagaaacatggtaagaactggacctcctcttccttatttctgtttcagtagttgtgccctctggtagtagctgccccacaggagatgtgagagcagaagggcctccaactagggagaccacaccgttgcagtccactgcactgtgcatcttcccattcatgggtagagtgggtatcccccgggaggcacggctggcctggctaacgttgctgggacgcctttctccatgtctgtgtggtacaaatagagagtctctcctgctgtcgttgtcctcaaacgtgctgtgttcatcgtccgcaaagtcattttcagaaccaatatccttcacccgacctttgaagctgaaaaggcttgctctactgttgcgtctcggagaaaaaagggagcctcggatgctcaagagagactggtgtggagaggaaaacctcttctcgtaggtcagtctactcccttctagggaaaaccggaagcctttctttcgtatgctgtcttcagaggcagatttccgcacagcatcttccttctcttcctctccagcctgctctttctgtttctttttcttccttctgtttttcagctccttttcactcttggaacttaactttgaagctacggaagaactctccgagaaaacacctatcccacctgctccactgaagtctctggattctgcagacgctgctgcagctgctgcctgagcttcttcttgctgcttcttaagttgctccagcatctgctgaaactctgcctccttctgttcagcttcctccagcgtggcctggttctgttcttcataggccatggccaccacagccaggatcaaatttattaggtagaatgagcccaagaaaatcacaagcacgaaaaatatcatatatgttttcccagcagcacgcaaggtcagctgataaaggttttcccagaagtcttgagtcataagacgaaataaggacaagaaggcccagctgaaggtgtcaaaactcgtgtagccatagttggggtttctcccagccttcacacagatgtatccttccggacactggccagcatccgagctgttaccacaaagcagagcatcgttttgtccttccaaaaaataaaagtgacttttatcttcaatatattcatcccagttaaacatgttcattgtcctattgaaggcagtaccattccaatccaatgagttattaaagaaggaagtgatgtttatttcaaaggtagaattgtctgggggccactgcaagcatttattcctcaggttgcccatgaagagctgcagcccgatgagagcaaagacactcagacagaacacagtgagtatcatgacgtcagacagcttcttcaccgactggatcagggcccccacgatggtcttcaggcctggaattacagaaatagttttcaaagctctcaagactctgaaagttcgaagagctgaaacattgcctaggtttacaaattctgttacatacgcaaaggtaatgactgtgaaatccagccagttccagggatcccgtagaaatgtgaaatcttctagacaaaagccccttgcaagtattttaataagtgattcaaaagtataaattcctgtaaaagtatactccacattctttgtccagtctggagggttgctcatggtcataaatacacagttggtaagaattgtgcacatgataagcacattgaataaagaatgtaccaaaatcttaatagctaattttctaatggggttgaagggagttaaaatgtacagggcggaggtggcactgaaccgagagattgctttccctttattcaatactataaaggttttcttattgatatagtaggggtccaggtcctccaggggctctgacaccatctctggaggaatgtctccataaataaaaggaagggattttcctgcttccaagtcactatttggctttgggccattttcgtcgtcttcgtccttgcgttcctgtttgggtctcttagctttctcttctgcaatgcgttgttcaatagcagcaagggattccctggtaaagaagcggaagctgtcaggtcctggcggtaccagcactgattgtgccatcttttcatcctgcttctttaatcactgtttagctcctcgcataagaaagtgccctgaagaagctgttacagagttttgggttgataggctggaagcaagaagactgcagctaaaattccatcaggctttaaaaaaaaaaaaatttttttttttttcaaattctcctttaaagaccacacc

SEQ ID NO: 45 - RNA, 8556 nt, Rattus norvegicus
  source 1..8556: mol_type = mRNA
ccctgtctttgcttttcctctttagtaaggatattattgcacatgtgagatttttacttcctactgtaggctgaattctagaaacctgcactggagactgctacattcaacacgcacatggattctgtgctatgattaccattccttttatttcagcactttcttacgcgaggagctaaacagtgactaaagaagcaggatgaaaagatggcacggtcagtgctggtacctccaggacctgacagcttccgcttctttaccagggaatcccttgctgctatcgaacagcgcattgcagaagagaaagctaagagacccaaacaggaacgcaaggacgaagacgatgaaaatggcccaaagccaaatagtgacttggaagcaggaaaatcccttccttttatttatggagacattcctccagagatggtgtcagaaccactggaggacctggacccctactatatcaataagaaaacctttatagtattgaataaggggaaagcaatctcgcggttcagcgccacctctgccctgtacattttaactcccttcaaccccattagaaaattagctattaagattttggtacattctttattcaatgtgcttatcatgtgcacaattcttaccaactgtgtgtttatgaccatgagtaaccctccagactggacaaagaatgtggagtatacttttacaggaatttatacttttgaatcacttattaaaatccttgcaaggggcttttgtctagaagatttcacatttctacgggatccctggaattggttggatttcacagtcattacttttgcgtatgtaacagaatttgtaaacctaggcaatgtttcagctcttcgaactttcagagtcttgagagctttgaaaactatttctgtaattccaggcctgaagaccatcgtgggggccctgatccagtcagtgaagaagctctctgacgtcatgatcctcaccgtgttctgtctcagtgtctttgctctaatcgggctgcagctcttcatgggcaacctgaggaataaatgcttgcagtggcccccagacaattctacctttgaaataaatatcacttccttctttaataactcattggattggaatggtactgccttcaataggacggtgaacatgtttaactgggacgaatatattgaagataaaagtcacttttattttttggaaggacaaaacgatgctctgctttgtgggaacagctcggatgctggacagtgtccagaaggatacatctgtgtgaaggctgggagaaaccccaactacggctacacaagttttgacaccttcagctgggccttcttgtccttatttcgtctcatgactcaagacttctgggaaaacctttatcagctgaccttgcgtgctgccgggaaaacatacatgatattttttgtgctggtcattttcttgggctcattctacctgataaatttgatcctggctgtggtggccatggcctacgaggaacagaaccaggccacactggaggaggctgaacagaaggaggcagagtttcagcagatgctggagcaactgaagaagcagcaggaggaagctcaggcagcagctgcagcagcgtccgcagaatccagagacttcagcggggcaggcgggataggtgttttctcggagagttcgtcagtagcctcaaagttaagttccaaaagtgaaaaggagttgaaaaacagaagaaagaaaaagaaacagaaagaacaggctggggaggaagagaaggaagacgcggtgcggaaatctgcctctgaggacagcatacgaaagaaaggcttccggttttccctggaaggaagtagattgacctacgagaagagattttcctctccgcaccagtctctcttgagcatccgaggctccctattttctccaagacgcaacagtagagcaagccttttcagcttcaaaggtcgagtgaaggatattggttccgaaaatgactttgcagacgatgaacacagcacatttgaggacaacgacagcagaagagactctctatttgtaccacacagacatggagaaaggcgtcctagcaatgtcagccaggccagccgtgcctcccgggggatacccactctacccatgaatgggaagatgcacagtgcagtggactgcaacggtgtggtgtccctggttggaggcccctctgcgctcacatcgcctgtggggcagctgctgccggagggcacaactactgagacagaaataaggaagaggagatccagttcttaccacgtctctatggacttgttggaagacccttcaaggcaaagggcaatgagtatggccagtattttgacgaacactatggaagaacttgaagaatccagacagaaatgcccaccctgctggtataaatttgctaatatgtgcctgatttgggactgttgtaagccatggctaaaggtaaaacacgttgtcaatctggtagtgatggatccatttgttgacctggccatcaccatctgcattgtgttaaatacgctcttcatggccatggagcactaccccatgactgagcagttcagcagtgtgctgtctgttgggaatttggtcttcactgggatcttcacggcagaaatgtttctcaagataatagccatggatccatattattacttccaagaaggctggaatatctttgatggctttatagtgagccttagtttaatggaactcggcttggcgaatgtggaaggattgtcagttctccgatcattccggctgcttagagtcttcaagttggcaaagtcctggcccacactgaacatgctcattaagatcatcggcaactcggtgggtgcactgggcaacctgaccctggtgctggccatcatcgtcttcatttttgctgtggtcggcatgcagctgtttggaaagagctacaaggagtgtgtctgtaagatttccaatgattgtgagctcccgcgctggcacatgcacgacttcttccactccttcctgatcgtgtttcgagtgctgtgtggggagtggatagagaccatgtgggactgcatggaggtcgcgggccagaccatgtgccttactgtcttcatgatggtcatggtgattgggaaccttgttgtcctgaacctcttcttggccttgctcctcagttctttcagctcagacaacctggctgccacagatgacgataacgaaatgaacaacctccagatagccgtgggaaggatgcagaagggaattgattttgttaaaaggaagatacgtgaattcattcagaaagcctttgtcagaaagcagaaagctttagatgaaatcaaaccgctggaagatctgaataacaagaaagacagttgtatctccaaccacacgaccatagaaataggcaaggacctcaattacctcaaagatggaaacgggacgaccagtggcataggcagcagtgtggagaagtatgtggtagatgagagtgattacatgtcgttcataaacaaccccagcctcaccgtgactgtgcccatcgcccttggagagtctgactttgaaaacttaaacacggaagaattcagtagtgagtcagatatggaagaaagcaaggagaaattgaatgcaactagctcatctgagggcagtacggttgatataggcgctccggcagagggagagcagccagaggccgaaccggaagaatcgcttgaaccggaagcgtgtttcacagaagactgtgtgagaaagttcaagtgttgtcagataagcatagaagagggcaaaggcaagctctggtggaacttgaggaaaacgtgctacaagatagtagagcataactggtttgaaaccttcatcgtctttatgattctgctcagcagtggtgctctggcctttgaagacatttatattgagcagcgaaagaccatcaagaccatgctggagtatgctgacaaggttttcacttatatcttcatcctggagatgcttctaaagtgggtggcctatggtttccaaatgtatttcaccaatgcctggtgctggctggacttcctgatcgttgatgtctccttggttagcttaactgcaaatgccttgggctattcggaacttggtgccatcaagtccctccgaacgttaagagctctgagacctctacgagccttatcccgatttgaaggaatgagggttgttgtaaacgctctcttaggcgccatcccctccataatgaacgtacttctggtctgcctgatcttttggctaatattcagtatcatgggggtgaatctctttgctggcaagttctaccattgcatcaactacaccacgggggaaatgtttgatgtgagcgtggtcaacaactacagtgaatgccaagctctcattgagagcaatcagacggccaggtggaagaacgtgaaggtcaacttcgataacgtgggactcggatacctttctctgctccaagtagccacctttaaaggatggatggatatcatgtatgcagctgttgactcaagaaatgtagaactgcagcccaaatacgaagacaatctctacatgtacctttactttgtcatcttcatcatcttcggctcattcttcaccctgaacctgttcattggtgtcatcatagacaacttcaaccagcagaagaagaagtttggaggtcaagacatctttatgacagaagaacagaagaaatactacaatgcaatgaagaagctcggctccaagaaaccgcagaagcccattcctcggcctgcaaacaaatttcaagggatggtctttgattttgtaaccaaacaagtctttgacatcagcatcatgatcctcatctgcctcaacatggtgaccatgatggtggaaacggacgaccagagtcaggagatgaccaacatcctgtactggatcaacctggtgttcattgtcctgttcacgggcgagtgtgtgctgaagctcatctccctccgccattattatttcaccatcggctggaatatttttgattttgtggtagtcatcctctccattgtaggaatgtttctcgcggagctgatagagaagtatttcgtgtcccctaccctgttccgagtcatccgcctggccaggattggacgaatcctacgcctgatcaaaggcgccaaggggatccgcactctgctctttgctctgatgatgtcccttcctgcgctgttcaacatcggcctcctgcttttcctggtcatgttcatctacgccatctttgggatgtccaactttgcctacgttaagagggaagttggaattgatgacatgttcaactttgagacttttggcaacagcatgatctgcctgttccaaatcaccacctctgccggctgggacggactgctggcccctatactaaatagcggacctcctgactgtgaccctgaaaaagatcaccctggaagctcggtgaagggggactgtgggaacccatctgtggggattttcttttttgtcagctacatcatcatatccttcctggtggtggtgaacatgtacatcgctgtcatcctggagaacttcagcgtcgccaccgaagaaagtgcagagcctctgagtgaggacgactttgagatgttctacgaggtctgggagaagttcgaccctgacgccactcagttcatagagttctgcaagctttctgactttgcagctgccctggatcctcccctcctcatcgcaaagccaaacaaagtccagctcattgccatggacctgcccatggtgagtggagaccgcatccactgcctggacatcttgtttgcttttacaaagcgggtcctgggcgagagtggagagatggacgctcttcgaatccagatggaagaaaggttcatggcttccaacccctccaaggtctcttatgagcccattaccaccaccctgaaacggaaacaagaggaggtgtctgctattgtcatccagcgagcatacaggcggtatctcctgaagcagaaagttaagaaagtttcgtctatctataaaaaagacaaaggtaaagaagacgagggaacgcccatcaaagaagacatcatcacagataaactgaacgagaattcaactccagagaagactgatgtgacaccttccacaacttctccaccttcctacgatagcgtgacgaaaccggagaaggaaaaatttgaaaaggacaaatcagaaaaagaggacaaagggaaagatatcagggaaagtaaaaagtaaaaaaataaaataataataataataacgaaaattaaaaattaaaaaaaaaagaatattccatttcgtgatcaactgtttacagcctgtgttggtgatgtatctgtgactccctcaggaggtccatgccaaactgactgtttctctaagtgtatacttaaggtcagtgcctataacaagacaggacctcgggtcagcacactgggattcaccaaaccagacaaagagcaccgacgggaggcttctatgttcacaaccagctgacactgctgaagagcggagagcaatggctactcagactagaagaacatggaaacggggaggaaagttaaatttttatgtaaatttaacatgtgacacttgatagcggtaactgtcaccactgtttgtgttttaactgccacacctgccatatttttacaaaatgtgtgctgtgactttatcactttttttttttttgattcacgggttgtttactcttatatgtgactatttttgtaaacgggtttatgttcggggagagggattacggaggggattcgacgtttctctatgtataacgagatctattttcaacgaaggtaatgctgcagctctcattcacacacgacgatatcccatcacaccaggaaagagcttacttctcatttcaggatgtttttagattttttgaggtgcttaaatagctattcatatttttaaggtgtttcatccagaggaattttaatgtgcctgtaaatgttccatagaaccacaaccatcaaaaagagttgttttatttttacatagttcattatatgtacatgtatatatgtctatatgtatatggccgtgtatatacatatatatgtatacacacatgcatacatatgcacacacagaccatcacatgctcagagtcctgacagcatgactataacatttttttaataagtgtcctttggtaaaaaaaatatatatatacatatatatatatctcctatcagtcctttctaagaaacccaaactaccaaaaaccacccccacggccactttctgaagttggttctgcttttttttccctgcagtattgtttagccatcttctgctcttggtaaggttgacatagtgtatgtcaattaaaaaacaacaacagcaacaaagtctgctttgtaaatagtaattttacccagtggtgcatgtttgagcaaatgaaaatgatttaagcacagtatttactgcatcaaatatgtaccacagttaagtatagtttgcaagctttcaacaggcgacatggtgtcactgggtcccttagagtttgaagctgtcaccgctgcatgtctctcttgctgatgccgctgtatcttaacccttctgctgttcagaagtctaacagggaagccatacgtcggtggcgaagtgaagcaaatcggtccaccaggaactcactcttcgtgacatgagccatgggttgcggtaaacgggaaggagatccttgttcttggttctcccaaaccttaatggaacagccggtgagatgtctgacagtgtaagctgcttagatctgttaaaagtatgtgcttcgagttttctaaggaaatatacatattgtaaaaaaggggggctcattttattttatttcaaagccttttgtacataaaatgggaaattaaaagtatcttcaggttgacgtcacagttctaccgttagtttctgttccccggcactttttaatcaaggcacttcgtcacggaagagataaggcctaagaggcagtgtagggctctggctgtcgttgttggtactgtggacttgcgcgtatttccacttgaaacaattctcattccaagtctaatgtccatttgctttcaatagtgatgccttatcattgacaagagatttcaaggggagcagatgacactcttggcattgcctgagtaggatgtcctcacctagtgtttctcctctactcatccatcttttttaatgttcgtttacacagatagatagatggatagatagaatcttactcatccacatggcaccagagctgtttcaggtatgattcgggaaccaagcgctctctctctctctctctctctctctctctctctctctctctctctctctctctctctctctctgttttccacaaaaccagttagtgaaatgatatcgccaattacagccaaacactttgtttcacagacaaccttcaatgtagattctttatactaaagctgttgacttgtagcgtgttcatgaatgcatgcaggaaaatgctattaccatacagagctaccggtaagccacattacgatcaagccaaaagaataaagattttttttttgcttt

SEQ ID NO: 46 - RNA, 8556 nt, Rattus norvegicus
  source 1..8556: mol_type = mRNA
aaagcaaaaaaaaaatctttattcttttggcttgatcgtaatgtggcttaccggtagctctgtatggtaatagcattttcctgcatgcattcatgaacacgctacaagtcaacagctttagtataaagaatctacattgaaggttgtctgtgaaacaaagtgtttggctgtaattggcgatatcatttcactaactggttttgtggaaaacagagagagagagagagagagagagagagagagagagagagagagagagagagagagagagagagcgcttggttcccgaatcatacctgaaacagctctggtgccatgtggatgagtaagattctatctatccatctatctatctgtgtaaacgaacattaaaaaagatggatgagtagaggagaaacactaggtgaggacatcctactcaggcaatgccaagagtgtcatctgctccccttgaaatctcttgtcaatgataaggcatcactattgaaagcaaatggacattagacttggaatgagaattgtttcaagtggaaatacgcgcaagtccacagtaccaacaacgacagccagagccctacactgcctcttaggccttatctcttccgtgacgaagtgccttgattaaaaagtgccggggaacagaaactaacggtagaactgtgacgtcaacctgaagatacttttaatttcccattttatgtacaaaaggctttgaaataaaataaaatgagccccccttttttacaatatgtatatttccttagaaaactcgaagcacatacttttaacagatctaagcagcttacactgtcagacatctcaccggctgttccattaaggtttgggagaaccaagaacaaggatctccttcccgtttaccgcaacccatggctcatgtcacgaagagtgagttcctggtggaccgatttgcttcacttcgccaccgacgtatggcttccctgttagacttctgaacagcagaagggttaagatacagcggcatcagcaagagagacatgcagcggtgacagcttcaaactctaagggacccagtgacaccatgtcgcctgttgaaagcttgcaaactatacttaactgtggtacatatttgatgcagtaaatactgtgcttaaatcattttcatttgctcaaacatgcaccactgggtaaaattactatttacaaagcagactttgttgctgttgttgttttttaattgacatacactatgtcaaccttaccaagagcagaagatggctaaacaatactgcagggaaaaaaaagcagaaccaacttcagaaagtggccgtgggggtggtttttggtagtttgggtttcttagaaaggactgataggagatatatatatatgtatatatatattttttttaccaaaggacacttattaaaaaaatgttatagtcatgctgtcaggactctgagcatgtgatggtctgtgtgtgcatatgtatgcatgtgtgtatacatatatatgtatatacacggccatatacatatagacatatatacatgtacatataatgaactatgtaaaaataaaacaactctttttgatggttgtggttctatggaacatttacaggcacattaaaattcctctggatgaaacaccttaaaaatatgaatagctatttaagcacctcaaaaaatctaaaaacatcctgaaatgagaagtaagctctttcctggtgtgatgggatatcgtcgtgtgtgaatgagagctgcagcattaccttcgttgaaaatagatctcgttatacatagagaaacgtcgaatcccctccgtaatccctctccccgaacataaacccgtttacaaaaatagtcacatataagagtaaacaacccgtgaatcaaaaaaaaaaaaagtgataaagtcacagcacacattttgtaaaaatatggcaggtgtggcagttaaaacacaaacagtggtgacagttaccgctatcaagtgtcacatgttaaatttacataaaaatttaactttcctccccgtttccatgttcttctagtctgagtagccattgctctccgctcttcagcagtgtcagctggttgtgaacatagaagcctcccgtcggtgctctttgtctggtttggtgaatcccagtgtgctgacccgaggtcctgtcttgttataggcactgaccttaagtatacacttagagaaacagtcagtttggcatggacctcctgagggagtcacagatacatcaccaacacaggctgtaaacagttgatcacgaaatggaatattcttttttttttaatttttaattttcgttattattattattattttatttttttactttttactttccctgatatctttccctttgtcctctttttctgatttgtccttttcaaatttttccttctccggtttcgtcacgctatcgtaggaaggtggagaagttgtggaaggtgtcacatcagtcttctctggagttgaattctcgttcagtttatctgtgatgatgtcttctttgatgggcgttccctcgtcttctttacctttgtcttttttatagatagacgaaactttcttaactttctgcttcaggagataccgcctgtatgctcgctggatgacaatagcagacacctcctcttgtttccgtttcagggtggtggtaatgggctcataagagaccttggaggggttggaagccatgaacctttcttccatctggattcgaagagcgtccatctctccactctcgcccaggacccgctttgtaaaagcaaacaagatgtccaggcagtggatgcggtctccactcaccatgggcaggtccatggcaatgagctggactttgtttggctttgcgatgaggaggggaggatccagggcagctgcaaagtcagaaagcttgcagaactctatgaactgagtggcgtcagggtcgaacttctcccagacctcgtagaacatctcaaagtcgtcctcactcagaggctctgcactttcttcggtggcgacgctgaagttctccaggatgacagcgatgtacatgttcaccaccaccaggaaggatatgatgatgtagctgacaaaaaagaaaatccccacagatgggttcccacagtcccccttcaccgagcttccagggtgatctttttcagggtcacagtcaggaggtccgctatttagtataggggccagcagtccgtcccagccggcagaggtggtgatttggaacaggcagatcatgctgttgccaaaagtctcaaagttgaacatgtcatcaattccaacttccctcttaacgtaggcaaagttggacatcccaaagatggcgtagatgaacatgaccaggaaaagcaggaggccgatgttgaacagcgcaggaagggacatcatcagagcaaagagcagagtgcggatccccttggcgcctttgatcaggcgtaggattcgtccaatcctggccaggcggatgactcggaacagggtaggggacacgaaatacttctctatcagctccgcgagaaacattcctacaatggagaggatgactaccacaaaatcaaaaatattccagccgatggtgaaataataatggcggagggagatgagcttcagcacacactcgcccgtgaacaggacaatgaacaccaggttgatccagtacaggatgttggtcatctcctgactctggtcgtccgtttccaccatcatggtcaccatgttgaggcagatgaggatcatgatgctgatgtcaaagacttgtttggttacaaaatcaaagaccatcccttgaaatttgtttgcaggccgaggaatgggcttctgcggtttcttggagccgagcttcttcattgcattgtagtatttcttctgttcttctgtcataaagatgtcttgacctccaaacttcttcttctgctggttgaagttgtctatgatgacaccaatgaacaggttcagggtgaagaatgagccgaagatgatgaagatgacaaagtaaaggtacatgtagagattgtcttcgtatttgggctgcagttctacatttcttgagtcaacagctgcatacatgatatccatccatcctttaaaggtggctacttggagcagagaaaggtatccgagtcccacgttatcgaagttgaccttcacgttcttccacctggccgtctgattgctctcaatgagagcttggcattcactgtagttgttgaccacgctcacatcaaacatttcccccgtggtgtagttgatgcaatggtagaacttgccagcaaagagattcacccccatgatactgaatattagccaaaagatcaggcagaccagaagtacgttcattatggaggggatggcgcctaagagagcgtttacaacaaccctcattccttcaaatcgggataaggctcgtagaggtctcagagctcttaacgttcggagggacttgatggcaccaagttccgaatagcccaaggcatttgcagttaagctaaccaaggagacatcaacgatcaggaagtccagccagcaccaggcattggtgaaatacatttggaaaccataggccacccactttagaagcatctccaggatgaagatataagtgaaaaccttgtcagcatactccagcatggtcttgatggtctttcgctgctcaatataaatgtcttcaaaggccagagcaccactgctgagcagaatcataaagacgatgaaggtttcaaaccagttatgctctactatcttgtagcacgttttcctcaagttccaccagagcttgcctttgccctcttctatgcttatctgacaacacttgaactttctcacacagtcttctgtgaaacacgcttccggttcaagcgattcttccggttcggcctctggctgctctccctctgccggagcgcctatatcaaccgtactgccctcagatgagctagttgcattcaatttctccttgctttcttccatatctgactcactactgaattcttccgtgtttaagttttcaaagtcagactctccaagggcgatgggcacagtcacggtgaggctggggttgtttatgaacgacatgtaatcactctcatctaccacatacttctccacactgctgcctatgccactggtcgtcccgtttccatctttgaggtaattgaggtccttgcctatttctatggtcgtgtggttggagatacaactgtctttcttgttattcagatcttccagcggtttgatttcatctaaagctttctgctttctgacaaaggctttctgaatgaattcacgtatcttccttttaacaaaatcaattcccttctgcatccttcccacggctatctggaggttgttcatttcgttatcgtcatctgtggcagccaggttgtctgagctgaaagaactgaggagcaaggccaagaagaggttcaggacaacaaggttcccaatcaccatgaccatcatgaagacagtaaggcacatggtctggcccgcgacctccatgcagtcccacatggtctctatccactccccacacagcactcgaaacacgatcaggaaggagtggaagaagtcgtgcatgtgccagcgcgggagctcacaatcattggaaatcttacagacacactccttgtagctctttccaaacagctgcatgccgaccacagcaaaaatgaagacgatgatggccagcaccagggtcaggttgcccagtgcacccaccgagttgccgatgatcttaatgagcatgttcagtgtgggccaggactttgccaacttgaagactctaagcagccggaatgatcggagaactgacaatccttccacattcgccaagccgagttccattaaactaaggctcactataaagccatcaaagatattccagccttcttggaagtaataatatggatccatggctattatcttgagaaacatttctgccgtgaagatcccagtgaagaccaaattcccaacagacagcacactgctgaactgctcagtcatggggtagtgctccatggccatgaagagcgtatttaacacaatgcagatggtgatggccaggtcaacaaatggatccatcactaccagattgacaacgtgttttacctttagccatggcttacaacagtcccaaatcaggcacatattagcaaatttataccagcagggtgggcatttctgtctggattcttcaagttcttccatagtgttcgtcaaaatactggccatactcattgccctttgccttgaagggtcttccaacaagtccatagagacgtggtaagaactggatctcctcttccttatttctgtctcagtagttgtgccctccggcagcagctgccccacaggcgatgtgagcgcagaggggcctccaaccagggacaccacaccgttgcagtccactgcactgtgcatcttcccattcatgggtagagtgggtatcccccgggaggcacggctggcctggctgacattgctaggacgcctttctccatgtctgtgtggtacaaatagagagtctcttctgctgtcgttgtcctcaaatgtgctgtgttcatcgtctgcaaagtcattttcggaaccaatatccttcactcgacctttgaagctgaaaaggcttgctctactgttgcgtcttggagaaaatagggagcctcggatgctcaagagagactggtgcggagaggaaaatctcttctcgtaggtcaatctacttccttccagggaaaaccggaagcctttctttcgtatgctgtcctcagaggcagatttccgcaccgcgtcttccttctcttcctccccagcctgttctttctgtttctttttctttcttctgtttttcaactccttttcacttttggaacttaactttgaggctactgacgaactctccgagaaaacacctatcccgcctgccccgctgaagtctctggattctgcggacgctgctgcagctgctgcctgagcttcctcctgctgcttcttcagttgctccagcatctgctgaaactctgcctccttctgttcagcctcctccagtgtggcctggttctgttcctcgtaggccatggccaccacagccaggatcaaatttatcaggtagaatgagcccaagaaaatgaccagcacaaaaaatatcatgtatgttttcccggcagcacgcaaggtcagctgataaaggttttcccagaagtcttgagtcatgagacgaaataaggacaagaaggcccagctgaaggtgtcaaaacttgtgtagccgtagttggggtttctcccagccttcacacagatgtatccttctggacactgtccagcatccgagctgttcccacaaagcagagcatcgttttgtccttccaaaaaataaaagtgacttttatcttcaatatattcgtcccagttaaacatgttcaccgtcctattgaaggcagtaccattccaatccaatgagttattaaagaaggaagtgatatttatttcaaaggtagaattgtctgggggccactgcaagcatttattcctcaggttgcccatgaagagctgcagcccgattagagcaaagacactgagacagaacacggtgaggatcatgacgtcagagagcttcttcactgactggatcagggcccccacgatggtcttcaggcctggaattacagaaatagttttcaaagctctcaagactctgaaagttcgaagagctgaaacattgcctaggtttacaaattctgttacatacgcaaaagtaatgactgtgaaatccaaccaattccagggatcccgtagaaatgtgaaatcttctagacaaaagccccttgcaaggattttaataagtgattcaaaagtataaattcctgtaaaagtatactccacattctttgtccagtctggagggttactcatggtcataaacacacagttggtaagaattgtgcacatgataagcacattgaataaagaatgtaccaaaatcttaatagctaattttctaatggggttgaagggagttaaaatgtacagggcagaggtggcgctgaaccgcgagattgctttccccttattcaatactataaaggttttcttattgatatagtaggggtccaggtcctccagtggttctgacaccatctctggaggaatgtctccataaataaaaggaagggattttcctgcttccaagtcactatttggctttgggccattttcatcgtcttcgtccttgcgttcctgtttgggtctcttagctttctcttctgcaatgcgctgttcgatagcagcaagggattccctggtaaagaagcggaagctgtcaggtcctggaggtaccagcactgaccgtgccatcttttcatcctgcttctttagtcactgtttagctcctcgcgtaagaaagtgctgaaataaaaggaatggtaatcatagcacagaatccatgtgcgtgttgaatgtagcagtctccagtgcaggtttctagaattcagcctacagtaggaagtaaaaatctcacatgtgcaataatatccttactaaagaggaaaagcaaagacaggg

SEQ ID NO: 47 - RNA, 8776 nt, Macaca mulatta
  source 1..8776: mol_type = mRNA
aacagacattgggtaccatcgaatgagtgtcagaacagaaagctaaggtgaaggagggaggatgctgtggtcatcctttcttgtttttttcttctttaatgaggatagaatacatgtgagattttactttctactccagtaaaaattctgaagaattgcattgaagactattatattcaacacatacgtggattctgtgttatgatttacatttttctttatttcagcactttcttatgcaaggagctaaacagtgattaaaggagcaggatgaaaagatggcacagtcagtgctggtaccgccaggacctgacagcttccgcttctttaccagggaatcccttgctgctattgaacaacgcattgcagaagagaaagctaagagacccaaacaggaacgcaaggatgaggatgatgaaaatggcccaaagccaaacagtgacttggaagcaggaaaatctcttccatttatttatggagacattcctccagagatggtgtcagtgcccctggaggatctggacccctactatatcaataagaaaacgtttatagtattgaataaagggaaagcaatctctcgattcagtgccacccccgccctttacattttaactcccttcaaccctattagaaaattagctattaagattttggtacattctttattcaatatgctcattatgtgcactattcttaccaactgtgtatttatgaccatgagtaaccctccagactggacaaagaatgtggagtatacctttacaggaatttatacttttgaatcacttattaaaatacttgcaaggggcttttgtttagaagatttcacatttttacgggatccatggaattggttggatttcacagtcattacttttgcatatgtgacagagtttgtggacctgggcaatgtctcagcgttgagaacattcagagttctccgagcattgaaaacaatttcagtcattccaggcctgaagaccattgtgggggccctgatccagtcagtgaagaagctttctgatgtcatgatcttgactgtgttctgtctaagcgtgtttgcgctaataggattacagttgttcatgggcaacctacgaaataaatgtttgcaatggcctccagataactcttcctttgaaataaatattacttccttctttaacaactcattggatgggaatggtaccactttcaacaggacagtgagcatgtttaactgggatgaatatattgaggataaaagtcacttttattttttagaagggcaaaatgatgctctgctttgtggcaacagctcagatgcaggccagtgtcctgaaggatacatctgtgtgaaggctggtagaaaccccaactatggctacacgagctttgatacctttagttgggcctttttgtccttatttcgtctcatgactcaagacttctgggaaaacctttatcaactgacactacgtgctgctgggaaaacgtacatgatattttttgtgctggtcattttcttgggctcattctatctaataaatctgatcttggctgtggtggccatggcctatgaggaacagaatcaggccacattggaagaggctgaacagaaggaagctgaatttcagcagatgctcgaacagttgaaaaagcaacaagaagaagctcaggcagcagccgcggccgcatctgctgaatcgagagacttcagtggtgctggtgggataggagttttttcagagagttcttcagtagcatctaagttgagctccaaaagtgaaaaagagctgaaaaatagaagaaagaaaaagaaacagaaagaacagtctggagaagaagagaaaaacgacagagtccgaaaatcggaatccgaagacagcataagaagaaaaggtttccgtttttccttggaaggaagtaggctgacatatgaaaagagattttcttctccacaccagtccttactgagcatccgtggctcccttttctctccaagacgcaacagtagggctagtcttttcagcttcagaggtcgaacaaaggacattggctctgagaatgactttgctgatgatgagcacagcacctttgaggacaatgacagccgaagagactctctgttcgtgccgcacagacatggagaacggcgccacagcaatgtcagccaggccagtcgtgcctccagggtgctccccatcctgcccatgaatgggaagatgcatagcgctgtggactgcaacggtgtggtctccctggtcgggggcccttctaccctcacatctgctgggcagctcctaccagagggcacgactactgaaacagaaataagaaagagacggtccagttcttatcatgtttccatggatttactggaagatcctacatcaaggcaaagagcaatgagtatagccagcattttgaccaacaccatggaagaacttgaagaatccagacagaaatgcccaccatgctggtataaatttgctaatatgtgtttgatttgggactgttgtaaaccgtggttaaaggtgaaacaccttgtcaacctggttgtaatggacccatttgttgacctggccatcaccatctgcattgtcttaaatacactcttcatggctatggagcactatcccatgacggagcagttcagcagtgtactgtctgttggaaacctggtcttcacggggatcttcacagcagaaatgtttctgaagataattgccatggatccatattattacttccaagaaggctggaatatttttgatggttttattgtgagccttagtttaatggaacttggtctggcaaatgtggaaggattgtctgttctccgatcattccggctgctccgagttttcaagttggcaaagtcttggccaactctaaatatgctaataaagatcattggcaattctgtgggggctctaggaaacctcaccttggtgttggccatcatcgtcttcatttttgctgtggtcggcatgcagctctttggtaagagctacaaagaatgtgtctgcaagatttccaatgactgtgaactcccacgctggcacatgcatgacttcttccactccttcctgatcgtgttccgagtgctgtgtggagagtggatagagaccatgtgggactgtatggaggtcgctggccaaaccatgtgccttactgtcttcatgatggtcatggtgattggaaatctagtggttctgaacctcttcttggccttgcttttgagttccttcagttctgacaatctggctgccactgatgatgataacgaaatgaataatctccagattgctgtgggaaggatgcagaaaggaatcgattttgttaaaagaaaaatacgtgaatttattcagaaagcctttgttaggaaacagaaagctttagatgaaattaaacctcttgaagatctaaataataaaaaagacagctgtatttccaaccataccaccatagaaataggcaaagacctcaattatctcaaagacggaaatggaactactagtggcataggcagcagtgtagaaaaatatgtcgtggatgaaagtgattacatgtcatttataaacaaccctagcctcactgtgacggtaccaattgctgttggagaatctgattttgaaaatttaaatactgaagaattcagcagcgagtcagatatggaggaaagcaaagagaagctaaatgcaactagttcatctgaaggcagcacagttgatataggagctcccgccgagggagaacaacctgaggttgaacctgaggaatcccttgaacctgaagcctgttttacagaagactgtgtacggaagttcaagtgttgtcagataagcatagaagaaggcaaagggaaactctggtggaatttgaggaaaacatgctataagatagtggagcacaattggtttgaaaccttcattgtcttcatgattctgctgagcagtggggctctggcctttgaagatatatacattgagcagcgaaaaaccattaagaccatgttagaatatgctgacaaggttttcacttacatattcatcctggaaatgctgctaaagtgggttgcatatggttttcaagtgtattttaccaatgcctggtgctggctagacttcttgattgttgatgtctcattggttagcttaactgcaaatgccttgggttactcagaacttggtgccatcaaatccctcagaacactaagagctctgaggccactgagagccttgtcccggtttgaaggaatgagggtggttgtaaatgctcttttaggagccattccatctatcatgaatgtacttctggtttgtctgatcttttggctaatattcagtataatgggagtgaatctctttgctggcaagttttaccattgtattaactacaccactggagagatgtttgatgtaagcgtggttaacaactacagcgagtgcaaagctctcattgaaagcaatcaaactgccaggtggaaaaatgtgaaagtaaacttcgataacgtgggacttggatatctgtctctacttcaagtagccacgtttaagggatggatggatattatgtatgcagctgttgactcaagaaatgtagaattgcaacccaagtatgaagacaacctgtacatgtatctttattttgtcatctttattatttttggttcattctttaccttgaatcttttcattggtgtcatcatagacaacttcaaccaacagaaaaagaagtttggaggtcaagacatttttatgacagaagaacagaagaaatactacaatgcaatgaaaaaactgggttcaaagaaaccacaaaaacccatacctcgacctgctaacaaattccaaggaatggtctttgattttgtaaccaaacaagtctttgatatcagcatcatgatcctcatctgccttaacatggtcaccatgatggtggaaaccgatgaccagagtcaagaaatgacaaacattctgtactggattaatctggtgtttattgttctgttcactggagaatgtgtgctgaaactgatctctcttcgttactactatttcactattggatggaatatttttgattttgtggtggtcattctctccattgtaggaatgtttctggctgaactgatagaaaagtattttgtgtcccctaccctgttccgagtgatccgtcttgccagaattggccgaatcctacgtctgatcaaaggagcaaaggggatccgcacgctgctctttgctttgatgatgtcccttcctgcattatttaacatcggcctcctgctcttcctggtcatgttcatctacgccatctttgggatgtccaactttgcctatgttaagagggaagttgggatcgatgacatgttcaactttgagacctttggcaacagcatgatctgcctgtttcaaattacaacctctgctggttgggatggattgctagctcctattcttaatagtggacctccagactgtgaccctgaaaaagatcaccctggaagctcagttaagggagattgtgggaacccatctgttgggattttcttttttgtcagttacatcatcatatccttcctggttgtggtgaacatgtacatcgcggtcatcctggagaacttcagtgttgctactgaagaaagtgcagagcccctgagtgaggatgactttgagatgttctatgaggtttgggagaagtttgatcccgatgcgacccagtttatagagtttgccaagctctctgattttgcagatgccctggatcctcctcttctcatagcaaaacccaacaaagtccagctcattgccatggatctgcccatggtcagcggtgaccggatccactgcctcgacatcttatttgcttttacaaagcgtgttttgggtgagagtggagagatggatgcccttcgaatacagatggaagagcgattcatggcatcaaacccctccaaagtctcttatgagcccattaccaccacgttgaaacgcaaacaagaggaggtgtctgctattattatccagagggcttacagacgctacctcttgaagcaaaaagttaaaaaggtatcaagtatatacaagaaagacaaaggcaaagaatgtgatggaacacctatcaaagaagatactctcattgataaactgaatgagaattcaactccagagaaaaccgatatgacgccttccaccacatctccaccctcgtatgatagtgtgaccaaaccggaaaaagaaaaatttgaaaaagacaaatcagaaaaggaagacaaagggaaagatatcagggaaagtaaaaagtaaaaagaaaccaagaatattccattttgtgatcaattgtttacagcccgtgatggtgatgtgtttgtgtctacaggactcccacaggaggtctatgccaaactgactgtttttacaaatgtatacttaaggtcagtgcctacaacaagacagagacctctggtcagcaaactggaactcagtaaactggagaagtagtatcgacaggaggtttctattttcacaaccagctgacactgctgaagagcagaggcgtaatggctactcagacgataggaaccaatttaaaggggggagggaagttaaatttttatgtaaattcaacatgtgacacttgataatagtaattgtcaccactgtttatgttttaactgccacacctgccatatttttacaaaacgtgtgctgtgaatttatcacttttctttttaattcacaggttgtttactattatatgtgactatttttgtaaatgggtttgtgtttggggagagggattaaagggagggaattctacatttctctattgtattgtataactggatatattttaaatggaggcatgctgcaattctcattcacacatgaaaaaaaatcacatcacaaaaggaaagactttacttcttgtttcaggatgtttttagatttttgaggtgcttaaatagctattcgtatttttaaggtgtctcatccagaaaaaatttaatgtgcctgtaaatgttccatagaatcacaagcattaaagagttgctttatttttacataatccattaaatgtacatgtatatatgtatatatgtatatgtgcgtgtatatacatatatatgtatacacacacacacagagatgtacacataccattacattgtcattcacagtcccagcagcatgactatcacatttttgataagtgtcctttggcataaaataaaaatatcctatcagtcctttctaagaaacctgaattgaccaaaaaacatccccaccaccactttataaagttgattctgctttatcctgcagtattgtttagccatcttctgctcttggtaaggttgacatagtatatgtcaatttaaaaaataaaagtctgctttgtaaatagtaattttacccagtggtgcatgtttgagcaaacgaaaatgatgatttaagcacactacttattgcatcaaatatgtaccacagtaagtatagtttgcaagctttcaacaggtaatatgatgtaattggttccattatagtttgaagctgtcactgctgcatgtttatcttgcctatgctgctgtatcttattccttccactgttcagaagtctaatatgggaagccatatgtcagtggtaaagtgaagcaaattgttctaccaagacctcattcttcatgtcattaagcaataggttgcagcaaacaaggaagagcttcttgctttttattcttccaaccttaattgaacactctatgatgaaaagcccgactgtacaaacacgttgcaagctgcttaaatctgtttaaaatatatggttagagttttctaaggaaatataaatactgtaaaaagttcattttattttatttttcagccttttgtacataaaatgagaaattaaaagtatcttcaggtggatttcacagtcactattgttagtttctgttcctagcacttttaaattgaagcacttcacaaaataagaagcaaggactaggatgcagtgtaggtttctgcttttttattagtactgtaaacttgcacacgtttcaatgtgaaacaaatctcaaactgagttcaatgtttatttgctttcaatagtaatgccttatcattgaaagaggcttaaagaaaaaaatcagctgatattcttggcattgcttgaatccaatgtttccacctagtctttttattcagtaatcatcagtcttttccaatgtttgtttacacagatagatcttattgacccatatggcactagaactgtatcagatataatatgggatcccagctttttttcccccccacaaaaccaggtagtgaagttatattaccagttacagcaaaatactttgtgtttcacaagcaacaataaatgtagattctctatactaaagctattgacttgtagtgtgttggtgaaatgcatgcaggaaaatgctgttaccataaagaacggtaaaccacattacaatcaagccaaaagaataaaggtttcgcttttgtttttgtatttaactgttgtctttgtttctatctttgaaatgccatttaaaggtacatttctatcatgtaaaaataatctatctgaaaaacaaatgtaaagaacacacattaattatgataattcatctttcaattttttcatggaatggaagttaattaagaagagtgtattggataactactttaatattggccaaaaacctagatatggcattaggtagagtagtggaaagttacaaaaattaataaaaaattgactaacactttaa

SEQ ID NO: 48 - RNA, 8776 nt, Macaca mulatta
  source 1..8776: mol_type = mRNA
ttaaagtgttagtcaattttttattaatttttgtaactttccactactctacctaatgccatatctaggtttttggccaatattaaagtagttatccaatacactcttcttaattaacttccattccatgaaaaaattgaaagatgaattatcataattaatgtgtgttctttacatttgtttttcagatagattatttttacatgatagaaatgtacctttaaatggcatttcaaagatagaaacaaagacaacagttaaatacaaaaacaaaagcgaaacctttattcttttggcttgattgtaatgtggtttaccgttctttatggtaacagcattttcctgcatgcatttcaccaacacactacaagtcaatagctttagtatagagaatctacatttattgttgcttgtgaaacacaaagtattttgctgtaactggtaatataacttcactacctggttttgtgggggggaaaaaaagctgggatcccatattatatctgatacagttctagtgccatatgggtcaataagatctatctgtgtaaacaaacattggaaaagactgatgattactgaataaaaagactaggtggaaacattggattcaagcaatgccaagaatatcagctgatttttttctttaagcctctttcaatgataaggcattactattgaaagcaaataaacattgaactcagtttgagatttgtttcacattgaaacgtgtgcaagtttacagtactaataaaaaagcagaaacctacactgcatcctagtccttgcttcttattttgtgaagtgcttcaatttaaaagtgctaggaacagaaactaacaatagtgactgtgaaatccacctgaagatacttttaatttctcattttatgtacaaaaggctgaaaaataaaataaaatgaactttttacagtatttatatttccttagaaaactctaaccatatattttaaacagatttaagcagcttgcaacgtgtttgtacagtcgggcttttcatcatagagtgttcaattaaggttggaagaataaaaagcaagaagctcttccttgtttgctgcaacctattgcttaatgacatgaagaatgaggtcttggtagaacaatttgcttcactttaccactgacatatggcttcccatattagacttctgaacagtggaaggaataagatacagcagcataggcaagataaacatgcagcagtgacagcttcaaactataatggaaccaattacatcatattacctgttgaaagcttgcaaactatacttactgtggtacatatttgatgcaataagtagtgtgcttaaatcatcattttcgtttgctcaaacatgcaccactgggtaaaattactatttacaaagcagacttttattttttaaattgacatatactatgtcaaccttaccaagagcagaagatggctaaacaatactgcaggataaagcagaatcaactttataaagtggtggtggggatgttttttggtcaattcaggtttcttagaaaggactgataggatatttttattttatgccaaaggacacttatcaaaaatgtgatagtcatgctgctgggactgtgaatgacaatgtaatggtatgtgtacatctctgtgtgtgtgtgtatacatatatatgtatatacacgcacatatacatatatacatatatacatgtacatttaatggattatgtaaaaataaagcaactctttaatgcttgtgattctatggaacatttacaggcacattaaattttttctggatgagacaccttaaaaatacgaatagctatttaagcacctcaaaaatctaaaaacatcctgaaacaagaagtaaagtctttccttttgtgatgtgattttttttcatgtgtgaatgagaattgcagcatgcctccatttaaaatatatccagttatacaatacaatagagaaatgtagaattccctccctttaatccctctccccaaacacaaacccatttacaaaaatagtcacatataatagtaaacaacctgtgaattaaaaagaaaagtgataaattcacagcacacgttttgtaaaaatatggcaggtgtggcagttaaaacataaacagtggtgacaattactattatcaagtgtcacatgttgaatttacataaaaatttaacttccctcccccctttaaattggttcctatcgtctgagtagccattacgcctctgctcttcagcagtgtcagctggttgtgaaaatagaaacctcctgtcgatactacttctccagtttactgagttccagtttgctgaccagaggtctctgtcttgttgtaggcactgaccttaagtatacatttgtaaaaacagtcagtttggcatagacctcctgtgggagtcctgtagacacaaacacatcaccatcacgggctgtaaacaattgatcacaaaatggaatattcttggtttctttttactttttactttccctgatatctttccctttgtcttccttttctgatttgtctttttcaaatttttctttttccggtttggtcacactatcatacgagggtggagatgtggtggaaggcgtcatatcggttttctctggagttgaattctcattcagtttatcaatgagagtatcttctttgataggtgttccatcacattctttgcctttgtctttcttgtatatacttgatacctttttaactttttgcttcaagaggtagcgtctgtaagccctctggataataatagcagacacctcctcttgtttgcgtttcaacgtggtggtaatgggctcataagagactttggaggggtttgatgccatgaatcgctcttccatctgtattcgaagggcatccatctctccactctcacccaaaacacgctttgtaaaagcaaataagatgtcgaggcagtggatccggtcaccgctgaccatgggcagatccatggcaatgagctggactttgttgggttttgctatgagaagaggaggatccagggcatctgcaaaatcagagagcttggcaaactctataaactgggtcgcatcgggatcaaacttctcccaaacctcatagaacatctcaaagtcatcctcactcaggggctctgcactttcttcagtagcaacactgaagttctccaggatgaccgcgatgtacatgttcaccacaaccaggaaggatatgatgatgtaactgacaaaaaagaaaatcccaacagatgggttcccacaatctcccttaactgagcttccagggtgatctttttcagggtcacagtctggaggtccactattaagaataggagctagcaatccatcccaaccagcagaggttgtaatttgaaacaggcagatcatgctgttgccaaaggtctcaaagttgaacatgtcatcgatcccaacttccctcttaacataggcaaagttggacatcccaaagatggcgtagatgaacatgaccaggaagagcaggaggccgatgttaaataatgcaggaagggacatcatcaaagcaaagagcagcgtgcggatcccctttgctcctttgatcagacgtaggattcggccaattctggcaagacggatcactcggaacagggtaggggacacaaaatacttttctatcagttcagccagaaacattcctacaatggagagaatgaccaccacaaaatcaaaaatattccatccaatagtgaaatagtagtaacgaagagagatcagtttcagcacacattctccagtgaacagaacaataaacaccagattaatccagtacagaatgtttgtcatttcttgactctggtcatcggtttccaccatcatggtgaccatgttaaggcagatgaggatcatgatgctgatatcaaagacttgtttggttacaaaatcaaagaccattccttggaatttgttagcaggtcgaggtatgggtttttgtggtttctttgaacccagttttttcattgcattgtagtatttcttctgttcttctgtcataaaaatgtcttgacctccaaacttctttttctgttggttgaagttgtctatgatgacaccaatgaaaagattcaaggtaaagaatgaaccaaaaataataaagatgacaaaataaagatacatgtacaggttgtcttcatacttgggttgcaattctacatttcttgagtcaacagctgcatacataatatccatccatcccttaaacgtggctacttgaagtagagacagatatccaagtcccacgttatcgaagtttactttcacatttttccacctggcagtttgattgctttcaatgagagctttgcactcgctgtagttgttaaccacgcttacatcaaacatctctccagtggtgtagttaatacaatggtaaaacttgccagcaaagagattcactcccattatactgaatattagccaaaagatcagacaaaccagaagtacattcatgatagatggaatggctcctaaaagagcatttacaaccaccctcattccttcaaaccgggacaaggctctcagtggcctcagagctcttagtgttctgagggatttgatggcaccaagttctgagtaacccaaggcatttgcagttaagctaaccaatgagacatcaacaatcaagaagtctagccagcaccaggcattggtaaaatacacttgaaaaccatatgcaacccactttagcagcatttccaggatgaatatgtaagtgaaaaccttgtcagcatattctaacatggtcttaatggtttttcgctgctcaatgtatatatcttcaaaggccagagccccactgctcagcagaatcatgaagacaatgaaggtttcaaaccaattgtgctccactatcttatagcatgttttcctcaaattccaccagagtttccctttgccttcttctatgcttatctgacaacacttgaacttccgtacacagtcttctgtaaaacaggcttcaggttcaagggattcctcaggttcaacctcaggttgttctccctcggcgggagctcctatatcaactgtgctgccttcagatgaactagttgcatttagcttctctttgctttcctccatatctgactcgctgctgaattcttcagtatttaaattttcaaaatcagattctccaacagcaattggtaccgtcacagtgaggctagggttgtttataaatgacatgtaatcactttcatccacgacatatttttctacactgctgcctatgccactagtagttccatttccgtctttgagataattgaggtctttgcctatttctatggtggtatggttggaaatacagctgtcttttttattatttagatcttcaagaggtttaatttcatctaaagctttctgtttcctaacaaaggctttctgaataaattcacgtatttttcttttaacaaaatcgattcctttctgcatccttcccacagcaatctggagattattcatttcgttatcatcatcagtggcagccagattgtcagaactgaaggaactcaaaagcaaggccaagaagaggttcagaaccactagatttccaatcaccatgaccatcatgaagacagtaaggcacatggtttggccagcgacctccatacagtcccacatggtctctatccactctccacacagcactcggaacacgatcaggaaggagtggaagaagtcatgcatgtgccagcgtgggagttcacagtcattggaaatcttgcagacacattctttgtagctcttaccaaagagctgcatgccgaccacagcaaaaatgaagacgatgatggccaacaccaaggtgaggtttcctagagcccccacagaattgccaatgatctttattagcatatttagagttggccaagactttgccaacttgaaaactcggagcagccggaatgatcggagaacagacaatccttccacatttgccagaccaagttccattaaactaaggctcacaataaaaccatcaaaaatattccagccttcttggaagtaataatatggatccatggcaattatcttcagaaacatttctgctgtgaagatccccgtgaagaccaggtttccaacagacagtacactgctgaactgctccgtcatgggatagtgctccatagccatgaagagtgtatttaagacaatgcagatggtgatggccaggtcaacaaatgggtccattacaaccaggttgacaaggtgtttcacctttaaccacggtttacaacagtcccaaatcaaacacatattagcaaatttataccagcatggtgggcatttctgtctggattcttcaagttcttccatggtgttggtcaaaatgctggctatactcattgctctttgccttgatgtaggatcttccagtaaatccatggaaacatgataagaactggaccgtctctttcttatttctgtttcagtagtcgtgccctctggtaggagctgcccagcagatgtgagggtagaagggcccccgaccagggagaccacaccgttgcagtccacagcgctatgcatcttcccattcatgggcaggatggggagcaccctggaggcacgactggcctggctgacattgctgtggcgccgttctccatgtctgtgcggcacgaacagagagtctcttcggctgtcattgtcctcaaaggtgctgtgctcatcatcagcaaagtcattctcagagccaatgtcctttgttcgacctctgaagctgaaaagactagccctactgttgcgtcttggagagaaaagggagccacggatgctcagtaaggactggtgtggagaagaaaatctcttttcatatgtcagcctacttccttccaaggaaaaacggaaaccttttcttcttatgctgtcttcggattccgattttcggactctgtcgtttttctcttcttctccagactgttctttctgtttctttttctttcttctatttttcagctctttttcacttttggagctcaacttagatgctactgaagaactctctgaaaaaactcctatcccaccagcaccactgaagtctctcgattcagcagatgcggccgcggctgctgcctgagcttcttcttgttgctttttcaactgttcgagcatctgctgaaattcagcttccttctgttcagcctcttccaatgtggcctgattctgttcctcataggccatggccaccacagccaagatcagatttattagatagaatgagcccaagaaaatgaccagcacaaaaaatatcatgtacgttttcccagcagcacgtagtgtcagttgataaaggttttcccagaagtcttgagtcatgagacgaaataaggacaaaaaggcccaactaaaggtatcaaagctcgtgtagccatagttggggtttctaccagccttcacacagatgtatccttcaggacactggcctgcatctgagctgttgccacaaagcagagcatcattttgcccttctaaaaaataaaagtgacttttatcctcaatatattcatcccagttaaacatgctcactgtcctgttgaaagtggtaccattcccatccaatgagttgttaaagaaggaagtaatatttatttcaaaggaagagttatctggaggccattgcaaacatttatttcgtaggttgcccatgaacaactgtaatcctattagcgcaaacacgcttagacagaacacagtcaagatcatgacatcagaaagcttcttcactgactggatcagggcccccacaatggtcttcaggcctggaatgactgaaattgttttcaatgctcggagaactctgaatgttctcaacgctgagacattgcccaggtccacaaactctgtcacatatgcaaaagtaatgactgtgaaatccaaccaattccatggatcccgtaaaaatgtgaaatcttctaaacaaaagccccttgcaagtattttaataagtgattcaaaagtataaattcctgtaaaggtatactccacattctttgtccagtctggagggttactcatggtcataaatacacagttggtaagaatagtgcacataatgagcatattgaataaagaatgtaccaaaatcttaatagctaattttctaatagggttgaagggagttaaaatgtaaagggcgggggtggcactgaatcgagagattgctttccctttattcaatactataaacgttttcttattgatatagtaggggtccagatcctccaggggcactgacaccatctctggaggaatgtctccataaataaatggaagagattttcctgcttccaagtcactgtttggctttgggccattttcatcatcctcatccttgcgttcctgtttgggtctcttagctttctcttctgcaatgcgttgttcaatagcagcaagggattccctggtaaagaagcggaagctgtcaggtcctggcggtaccagcactgactgtgccatcttttcatcctgctcctttaatcactgtttagctccttgcataagaaagtgctgaaataaagaaaaatgtaaatcataacacagaatccacgtatgtgttgaatataatagtcttcaatgcaattcttcagaatttttactggagtagaaagtaaaatctcacatgtattctatcctcattaaagaagaaaaaaacaagaaaggatgaccacagcatcctccctccttcaccttagctttctgttctgacactcattcgatggtacccaatgtctgtt

SEQ ID NO: 49 - RNA, 8787 nt, Macaca fascicularis
  source 1..8787: mol_type = mRNA
ctgttttctaacagacattgggtaccatcgaatgagtgtcagaacagaaagctaaggtaaaggagggaggatgctgtggtcatcctttcttgtttttttcttctttaatgaggatagaatacatgtgagattttactttctactccagtaaaaattctgaagaattgcattgaagactattatattcaacacatacgtggattctgtgttatgatttacatttttctttatttcagcactttcttatgcaaggagctaaacagtgattaaaggagcaggatgaaaagatggcacagtcagtgctggtaccgccaggacctgacagcttccgcttctttaccagggaatcccttgctgctattgaacaacgcattgcagaagagaaagctaagagacccaaacaggaacgcaaggatgaggatgatgaaaatggcccaaagccaaacagtgacttggaagcaggaaaatctcttccatttatttatggagacattcctccagagatggtgtcagtgcccctggaggatctggacccctactatatcaataagaaaacgtttatagtattgaataaagggaaagcaatctctcgattcagtgccacccccgccctttacattttaactcccttcaaccctattagaaaattagctattaagattttggtacattctttattcaatatgctcattatgtgcactattcttaccaactgtgtatttatgaccatgagtaaccctccagactggacaaagaatgtggagtatacctttacaggaatttatacttttgaatcacttattaaaatacttgcaaggggcttttgtttagaagatttcacatttttacgggatccatggaattggttggatttcacagtcattacttttgcatatgtgacagagtttgtggacctgggcaatgtctcagcgttgagaacattcagagttctccgagcattgaaaacaatttcagtcattccaggcctgaagaccattgtgggggccctgatccagtcagtgaagaagctttctgatgtcatgatcttgactgtgttctgtctaagcgtgtttgcgctaataggattacagttgttcatgggcaacctacgaaataaatgtttgcaatggcctccagataactcttcctttgaaataaatattacttccttctttaacaactcattggatgggaatggtaccactttcaataggacagtgagcatgtttaactgggatgaatatattgaggataaaagtcacttttattttttagaagggcaaaatgatgctctgctttgtggcaacagctcagatgcaggccagtgtcctgaaggatacatctgtgtgaaggctggtagaaaccccaactatggctacacgagctttgatacctttagttgggcctttttgtccttatttcgtctcatgactcaagacttctgggaaaacctttatcaactgacactacgtgctgctgggaaaacgtacatgatattttttgtgctggtcattttcttgggctcattctatctaataaatctgatcttggctgtggtggccatggcctatgaggaacagaatcaggccacattggaagaggctgaacagaaggaagctgaatttcagcagatgctcgaacagttgaaaaagcaacaagaagaagctcaggcagcagctgcggccgcatctgctgaatcaagagacttcagtggtgctggtgggataggagttttttcagagagttcttcagtagcatctaagttgagctccaaaagtgaaaaagagctgaaaaatagaagaaagaaaaagaaacagaaagaacagtctggagaagaagagaaaaacgacagagtccgaaaatcggaatccgaagacagcataagaagaaaaggtttccgtttttccttggaaggaagtaggctgacatatgaaaagagattttcttctccacaccagtccttactgagcatccgtggctcccttttctctccaagacgcaacagtagggctagtcttttcagcttcagaggtcgaacaaaggacattggctctgagaatgactttgctgatgatgagcacagcacctttgaggacaatgacagccgaagagactctctgttcgtgccgcacagacatggagaacggcgccacagcaatgtcagccaggccagtcgtgcctccagggtgctccccatcctgcccatgaatgggaagatgcatagcgctgtggactgcaacggtgtggtctccctggtcgggggcccttctaccctcacatctgctgggcagctcctaccagagggcacgactactgaaacagaaataagaaagagacggtccagttcttatcatgtttccatggatttactggaagatcctacatcaaggcaaagagcaatgagtatagccagcattttgaccaacaccatggaagaacttgaagaatccagacagaaatgcccaccatgctggtataaatttgctaatatgtgtttgatttgggactgttgtaaaccatggttaaaggtgaaacaccttgtcaacctggttgtaatggacccatttgttgacctggccatcaccatctgcattgtcttaaatacactcttcatggctatggagcactatcccatgacggagcagttcagcagtgtactgtctgttggaaacctggtcttcacggggatcttcacagcagaaatgtttctgaagataattgccatggatccatattattacttccaagaaggctggaatatttttgatggttttattgtgagccttagtttaatggaacttggtctggcaaatgtggaaggattgtctgttctccgatcattccggctgctccgagttttcaagttggcaaagtcttggccaactctaaatatgctaataaagatcattggcaattctgtgggggctctaggaaacctcaccttggtgttggccatcatcgtcttcatttttgctgtggtcggcatgcagctctttggtaagagctacaaagaatgtgtctgcaagatttccaatgactgtgaactcccacgctggcacatgcatgacttcttccactccttcctgatcgtgttccgagtgctgtgtggagagtggatagagaccatgtgggactgtatggaggtcgctggccaaaccatgtgccttactgtcttcatgatggtcatggtgattggaaatctagtggttctgaacctcttcttggccttgcttttgagttccttcagttctgacaatctggctgccactgatgatgataacgaaatgaataatctccagattgctgtgggaaggatgcagaaaggaatcgattttgttaaaagaaaaatacgtgaatttattcagaaagcctttgttaggaaacagaaagctttagatgaaattaaacctcttgaagatctaaataataaaaaagacagctgtatttccaaccataccaccatagaaataggcaaagacctcaattatctcaaagacggaaatggaactactagtggcataggcagcagtgtagaaaaatatgtcgtggatgaaagtgattacatgtcatttataaacaaccctagcctcactgtgacggtaccaattgctgttggagaatctgattttgaaaatttaaatactgaagaattcagcagcgagtcagatatggaggaaagcaaagagaagctaaatgcaactagttcatctgaaggcagcacagttgatataggagctcccgccgagggagaacaacctgaggttgaacctgaggaatctcttgaacctgaagcctgttttacagaagactgtgtacggaagttcaagtgttgtcagataagcatagaagaaggcaaagggaaactctggtggaatttgaggaaaacatgctataagatagtggagcacaattggtttgaaaccttcattgtcttcatgattctgctgagcagtggggctctggcctttgaagatatatacattgagcagcgaaaaaccattaagaccatgttagaatatgctgacaaggttttcacttacatattcatcctggaaatgctgctaaagtgggttgcatatggttttcaagtgtattttaccaatgcctggtgctggctagacttcctgattgttgatgtctcattggttagcttaactgcaaatgccttgggttactcagaacttggtgccatcaaatccctcagaacactaagagctctgaggccactgagagccttgtcccggtttgaaggaatgagggtggttgtaaatgctcttttaggagccattccatctatcatgaatgtacttctggtttgtctgatcttttggctaatattcagtataatgggagtgaatctctttgctggcaagttttaccattgtattaactacaccactggagagatgtttgatgtaagcgtggttaacaactacagcgagtgcaaagctctcattgaaagcaatcaaactgccaggtggaaaaatgtgaaagtaaacttcgataacgtgggacttggatatctgtctctacttcaagtagccacgtttaagggatggatggatattatgtatgcagctgttgactcaagaaatgtagaattgcaacccaagtatgaagacaacctgtacatgtatctttattttgtcatctttattatttttggttcattctttaccttgaatcttttcattggtgtcatcatagacaacttcaaccaacagaaaaagaagtttggaggtcaagacatttttatgacagaagaacagaagaaatactacaatgcaatgaaaaaactgggttcaaagaaaccacaaaaacccatacctcgacctgctaacaaattccaaggaatggtctttgattttgtaaccaaacaagtctttgatatcagcatcatgatcctcatctgccttaacatggtcaccatgatggtggaaaccgatgaccagagtcaagaaatgacaaacattctgtactggattaatctggtgtttattgttctgttcactggagaatgtgtgctgaaactgatctctcttcgttactactatttcactattggatggaatatttttgattttgtggtggtcattctctccattgtaggaatgtttctggctgaactgatagaaaagtattttgtgtcccctaccctgttccgagtgatccgtcttgccagaattggccgaatcctacgtctgatcaaaggagcaaaggggatccgcacgctgctctttgctttgatgatgtcccttcctgcattatttaacatcggcctcctgctcttcctggtcatgttcatctacgccatctttgggatgtccaactttgcctatgttaagagggaagttgggatcgatgacatgttcaactttgagacctttggcaacagcatgatctgcctgtttcaaattacaacctctgctggttgggatggattgctagcgcctattcttaatagtggacctccagactgtgaccctgaaaaagatcaccctggaagctcagttaagggagattgtgggaacccatctgttgggattttcttttttgtcagttacatcatcatatccttcctggttgtggtgaacatgtacatcgcggtcatcctggagaacttcagtgttgctactgaagaaagtgcagagcccctgagtgaggatgactttgagatgttctatgaggtttgggagaagtttgatcccgatgcgacccagtttatagagtttgccaagctctctgattttgcagatgccctggatcctcctcttctcatagcaaaacccaacaaagtccagctcattgccatggatctgcccatggtcagcggtgaccggatccactgcctcgacatcttatttgcttttacaaagcgtgttttgggtgagagtggagagatggatgcccttcgaatacagatggaagagcgattcatggcatcaaacccctccaaagtctcttatgagcccattaccaccacgttgaaacgcaaacaagaggaggtgtctgctattattatccagagggcttacagacgctacctcttgaagcaaaaagttaaaaaggtatcaagtatatacaagaaagacaaaggcaaagaatgtgatggaacacctatcaaagaagatactctcattgataaactgaatgagaattcaactccagagaaaaccgatatgacgccttccaccacatctccaccctcgtatgatagtgtgaccaaaccggaaaaagaaaaatttgaaaaagacaaatcagaaaaggaagacaaagggaaagatatcagggaaagtaaaaagtaaaaagaaaccaagaatattccattttgtgatcaattgtttacagcccgtgatggtgatgtgtttgtgtctacaggactcccacaggaggtctatgccaaactgactgtttttacaaatgtatacttaaggtcagtgcctacaacaagacagagacctctggtcagcaaactggaactcagtaaactggagaagtagtatcgacaggaggtttctattttcacaaccagctgacactgctgaagagcagaggcgtaatggctactcagacgataggaaccaatttaaaggggggagggaagttaaatttttatgtaaattcaacatgtgacacttgataatagtaattgtcaccactgtttatgttttaactgccacacctgccatatttttacaaaacgtgtgctgtgaatttatcacttttctttttaattcacaggttgtttactattatatgtgactatttttgtaaatgggtttgtgtttggggagagggattaaagggagggaattctacatttctctattgtattgtataactggatatattttaaatggaggcatgctgcaattctcattcacacatgaaaaaaaatcacatcacaaaaggaaagactttacttcttgtttcaggatgtttttagatttttgaggtgcttaaatagctattcgtatttttaaggtgtctcatccagaaaaaatttaatgtgcctgtaaatgttccatagaatcacaagcattaaagagttgctttatttttacataatccattaaatgtacatgtatatatgtatatatgtatatgtgcgtgtatatacatatatatgtatacacacacacacacagagatgtacacataccattacattgtcattcacagtcccagcagcatgactatcacatttttgataagtgtcctttggcataaaataaaaatatcctatcagtcctttctaagaaacctgaattgaccaaaaaacatccccaccaccactttataaagttgattctgctttatcctgcagtattgtttagccatcttctgctcttggtaaggttgacatagtatatgtcaatttaaaaaataaaagtctgctttgtaaatagtaattttacccagtggtgcatgtttgagcaaacgaaaatgatgatttaagcacactacttattgcatcaaatatgtaccacagtaagtatagtttgcaagctttcaacaggtaatatgatgtaattggttccattatagtttgaagctgtcactgctgcatgtttatcttgcctatgctgctgtatcttattccttccactgttcagaagtctaatatgggaagccatatgtcagtggtaaagtgaagcaaattgttctaccaagacctcattcttcatgtcattaagcaataggttgcagcaaacaaggaagagcttcttgctttttattcttccaaccttaattgaacactctatgatgaaaagcccgactgtacaaacacgttgcaagctgcttaaatctgtttaaaatatatggttagagttttctaaggaaatataaatactgtaaaaagttcattttattttatttttcagccttttgtacataaaatgagaaattaaaagtatcttcaggtggatttcacagtcactattgttagtttctgttcctagcacttttaaattgaagcacttcacaaaataagaagcaaggactaggatgcagtgtaggtttctgcttttttattagtactgtaaacttgcacacgtttcaatgtgaaacaaatctcaaactgagttcaatgtttatttgctttcaatagtaatgccttatcattgaaagaggcttaaagaaaaaaatcagctgatattcttggcattgcttgaatccaatgtttccacctagtctttttattcagtaatcatcagtcttttccaatgtttgtttacacagatagatcttattgacccatatggcactagaactgtatcagatataatatgggatcccagctttttttcccccccacaaaaccaggtagtgaagttatattaccagttacagcaaaatactttgtgtttcacaagcaacaataaatgtagattctctatactaaagctattgacttgtagtgtgttggtgaaatgcatgcaggaaaatgctgttaccataaagaacggtaaaccacattacaatcaagccaaaagaataaaggtttcgcttttgtttttgtatttaattgttgtctttgtttctatctttgaaatgccatttaaaggtacatttctatcatgtaaaaataatctatctgaaaaacaaatgtaaagaacacacattaattatgataattcatctttcaattttttcatggaatggaagttaattaagaagagtgtattggataactactttaatattggccaaaaacctagatatggcattaggtagagtagtggaaagttacaaaaattaataaaaaattgactaacactttaa

SEQ ID NO: 50 - RNA, 8787 nt, Macaca fascicularis
  source 1..8787: mol_type = mRNA
ttaaagtgttagtcaattttttattaatttttgtaactttccactactctacctaatgccatatctaggtttttggccaatattaaagtagttatccaatacactcttcttaattaacttccattccatgaaaaaattgaaagatgaattatcataattaatgtgtgttctttacatttgtttttcagatagattatttttacatgatagaaatgtacctttaaatggcatttcaaagatagaaacaaagacaacaattaaatacaaaaacaaaagcgaaacctttattcttttggcttgattgtaatgtggtttaccgttctttatggtaacagcattttcctgcatgcatttcaccaacacactacaagtcaatagctttagtatagagaatctacatttattgttgcttgtgaaacacaaagtattttgctgtaactggtaatataacttcactacctggttttgtgggggggaaaaaaagctgggatcccatattatatctgatacagttctagtgccatatgggtcaataagatctatctgtgtaaacaaacattggaaaagactgatgattactgaataaaaagactaggtggaaacattggattcaagcaatgccaagaatatcagctgatttttttctttaagcctctttcaatgataaggcattactattgaaagcaaataaacattgaactcagtttgagatttgtttcacattgaaacgtgtgcaagtttacagtactaataaaaaagcagaaacctacactgcatcctagtccttgcttcttattttgtgaagtgcttcaatttaaaagtgctaggaacagaaactaacaatagtgactgtgaaatccacctgaagatacttttaatttctcattttatgtacaaaaggctgaaaaataaaataaaatgaactttttacagtatttatatttccttagaaaactctaaccatatattttaaacagatttaagcagcttgcaacgtgtttgtacagtcgggcttttcatcatagagtgttcaattaaggttggaagaataaaaagcaagaagctcttccttgtttgctgcaacctattgcttaatgacatgaagaatgaggtcttggtagaacaatttgcttcactttaccactgacatatggcttcccatattagacttctgaacagtggaaggaataagatacagcagcataggcaagataaacatgcagcagtgacagcttcaaactataatggaaccaattacatcatattacctgttgaaagcttgcaaactatacttactgtggtacatatttgatgcaataagtagtgtgcttaaatcatcattttcgtttgctcaaacatgcaccactgggtaaaattactatttacaaagcagacttttattttttaaattgacatatactatgtcaaccttaccaagagcagaagatggctaaacaatactgcaggataaagcagaatcaactttataaagtggtggtggggatgttttttggtcaattcaggtttcttagaaaggactgataggatatttttattttatgccaaaggacacttatcaaaaatgtgatagtcatgctgctgggactgtgaatgacaatgtaatggtatgtgtacatctctgtgtgtgtgtgtgtatacatatatatgtatatacacgcacatatacatatatacatatatacatgtacatttaatggattatgtaaaaataaagcaactctttaatgcttgtgattctatggaacatttacaggcacattaaattttttctggatgagacaccttaaaaatacgaatagctatttaagcacctcaaaaatctaaaaacatcctgaaacaagaagtaaagtctttccttttgtgatgtgattttttttcatgtgtgaatgagaattgcagcatgcctccatttaaaatatatccagttatacaatacaatagagaaatgtagaattccctccctttaatccctctccccaaacacaaacccatttacaaaaatagtcacatataatagtaaacaacctgtgaattaaaaagaaaagtgataaattcacagcacacgttttgtaaaaatatggcaggtgtggcagttaaaacataaacagtggtgacaattactattatcaagtgtcacatgttgaatttacataaaaatttaacttccctcccccctttaaattggttcctatcgtctgagtagccattacgcctctgctcttcagcagtgtcagctggttgtgaaaatagaaacctcctgtcgatactacttctccagtttactgagttccagtttgctgaccagaggtctctgtcttgttgtaggcactgaccttaagtatacatttgtaaaaacagtcagtttggcatagacctcctgtgggagtcctgtagacacaaacacatcaccatcacgggctgtaaacaattgatcacaaaatggaatattcttggtttctttttactttttactttccctgatatctttccctttgtcttccttttctgatttgtctttttcaaatttttctttttccggtttggtcacactatcatacgagggtggagatgtggtggaaggcgtcatatcggttttctctggagttgaattctcattcagtttatcaatgagagtatcttctttgataggtgttccatcacattctttgcctttgtctttcttgtatatacttgatacctttttaactttttgcttcaagaggtagcgtctgtaagccctctggataataatagcagacacctcctcttgtttgcgtttcaacgtggtggtaatgggctcataagagactttggaggggtttgatgccatgaatcgctcttccatctgtattcgaagggcatccatctctccactctcacccaaaacacgctttgtaaaagcaaataagatgtcgaggcagtggatccggtcaccgctgaccatgggcagatccatggcaatgagctggactttgttgggttttgctatgagaagaggaggatccagggcatctgcaaaatcagagagcttggcaaactctataaactgggtcgcatcgggatcaaacttctcccaaacctcatagaacatctcaaagtcatcctcactcaggggctctgcactttcttcagtagcaacactgaagttctccaggatgaccgcgatgtacatgttcaccacaaccaggaaggatatgatgatgtaactgacaaaaaagaaaatcccaacagatgggttcccacaatctcccttaactgagcttccagggtgatctttttcagggtcacagtctggaggtccactattaagaataggcgctagcaatccatcccaaccagcagaggttgtaatttgaaacaggcagatcatgctgttgccaaaggtctcaaagttgaacatgtcatcgatcccaacttccctcttaacataggcaaagttggacatcccaaagatggcgtagatgaacatgaccaggaagagcaggaggccgatgttaaataatgcaggaagggacatcatcaaagcaaagagcagcgtgcggatcccctttgctcctttgatcagacgtaggattcggccaattctggcaagacggatcactcggaacagggtaggggacacaaaatacttttctatcagttcagccagaaacattcctacaatggagagaatgaccaccacaaaatcaaaaatattccatccaatagtgaaatagtagtaacgaagagagatcagtttcagcacacattctccagtgaacagaacaataaacaccagattaatccagtacagaatgtttgtcatttcttgactctggtcatcggtttccaccatcatggtgaccatgttaaggcagatgaggatcatgatgctgatatcaaagacttgtttggttacaaaatcaaagaccattccttggaatttgttagcaggtcgaggtatgggtttttgtggtttctttgaacccagttttttcattgcattgtagtatttcttctgttcttctgtcataaaaatgtcttgacctccaaacttctttttctgttggttgaagttgtctatgatgacaccaatgaaaagattcaaggtaaagaatgaaccaaaaataataaagatgacaaaataaagatacatgtacaggttgtcttcatacttgggttgcaattctacatttcttgagtcaacagctgcatacataatatccatccatcccttaaacgtggctacttgaagtagagacagatatccaagtcccacgttatcgaagtttactttcacatttttccacctggcagtttgattgctttcaatgagagctttgcactcgctgtagttgttaaccacgcttacatcaaacatctctccagtggtgtagttaatacaatggtaaaacttgccagcaaagagattcactcccattatactgaatattagccaaaagatcagacaaaccagaagtacattcatgatagatggaatggctcctaaaagagcatttacaaccaccctcattccttcaaaccgggacaaggctctcagtggcctcagagctcttagtgttctgagggatttgatggcaccaagttctgagtaacccaaggcatttgcagttaagctaaccaatgagacatcaacaatcaggaagtctagccagcaccaggcattggtaaaatacacttgaaaaccatatgcaacccactttagcagcatttccaggatgaatatgtaagtgaaaaccttgtcagcatattctaacatggtcttaatggtttttcgctgctcaatgtatatatcttcaaaggccagagccccactgctcagcagaatcatgaagacaatgaaggtttcaaaccaattgtgctccactatcttatagcatgttttcctcaaattccaccagagtttccctttgccttcttctatgcttatctgacaacacttgaacttccgtacacagtcttctgtaaaacaggcttcaggttcaagagattcctcaggttcaacctcaggttgttctccctcggcgggagctcctatatcaactgtgctgccttcagatgaactagttgcatttagcttctctttgctttcctccatatctgactcgctgctgaattcttcagtatttaaattttcaaaatcagattctccaacagcaattggtaccgtcacagtgaggctagggttgtttataaatgacatgtaatcactttcatccacgacatatttttctacactgctgcctatgccactagtagttccatttccgtctttgagataattgaggtctttgcctatttctatggtggtatggttggaaatacagctgtcttttttattatttagatcttcaagaggtttaatttcatctaaagctttctgtttcctaacaaaggctttctgaataaattcacgtatttttcttttaacaaaatcgattcctttctgcatccttcccacagcaatctggagattattcatttcgttatcatcatcagtggcagccagattgtcagaactgaaggaactcaaaagcaaggccaagaagaggttcagaaccactagatttccaatcaccatgaccatcatgaagacagtaaggcacatggtttggccagcgacctccatacagtcccacatggtctctatccactctccacacagcactcggaacacgatcaggaaggagtggaagaagtcatgcatgtgccagcgtgggagttcacagtcattggaaatcttgcagacacattctttgtagctcttaccaaagagctgcatgccgaccacagcaaaaatgaagacgatgatggccaacaccaaggtgaggtttcctagagcccccacagaattgccaatgatctttattagcatatttagagttggccaagactttgccaacttgaaaactcggagcagccggaatgatcggagaacagacaatccttccacatttgccagaccaagttccattaaactaaggctcacaataaaaccatcaaaaatattccagccttcttggaagtaataatatggatccatggcaattatcttcagaaacatttctgctgtgaagatccccgtgaagaccaggtttccaacagacagtacactgctgaactgctccgtcatgggatagtgctccatagccatgaagagtgtatttaagacaatgcagatggtgatggccaggtcaacaaatgggtccattacaaccaggttgacaaggtgtttcacctttaaccatggtttacaacagtcccaaatcaaacacatattagcaaatttataccagcatggtgggcatttctgtctggattcttcaagttcttccatggtgttggtcaaaatgctggctatactcattgctctttgccttgatgtaggatcttccagtaaatccatggaaacatgataagaactggaccgtctctttcttatttctgtttcagtagtcgtgccctctggtaggagctgcccagcagatgtgagggtagaagggcccccgaccagggagaccacaccgttgcagtccacagcgctatgcatcttcccattcatgggcaggatggggagcaccctggaggcacgactggcctggctgacattgctgtggcgccgttctccatgtctgtgcggcacgaacagagagtctcttcggctgtcattgtcctcaaaggtgctgtgctcatcatcagcaaagtcattctcagagccaatgtcctttgttcgacctctgaagctgaaaagactagccctactgttgcgtcttggagagaaaagggagccacggatgctcagtaaggactggtgtggagaagaaaatctcttttcatatgtcagcctacttccttccaaggaaaaacggaaaccttttcttcttatgctgtcttcggattccgattttcggactctgtcgtttttctcttcttctccagactgttctttctgtttctttttctttcttctatttttcagctctttttcacttttggagctcaacttagatgctactgaagaactctctgaaaaaactcctatcccaccagcaccactgaagtctcttgattcagcagatgcggccgcagctgctgcctgagcttcttcttgttgctttttcaactgttcgagcatctgctgaaattcagcttccttctgttcagcctcttccaatgtggcctgattctgttcctcataggccatggccaccacagccaagatcagatttattagatagaatgagcccaagaaaatgaccagcacaaaaaatatcatgtacgttttcccagcagcacgtagtgtcagttgataaaggttttcccagaagtcttgagtcatgagacgaaataaggacaaaaaggcccaactaaaggtatcaaagctcgtgtagccatagttggggtttctaccagccttcacacagatgtatccttcaggacactggcctgcatctgagctgttgccacaaagcagagcatcattttgcccttctaaaaaataaaagtgacttttatcctcaatatattcatcccagttaaacatgctcactgtcctattgaaagtggtaccattcccatccaatgagttgttaaagaaggaagtaatatttatttcaaaggaagagttatctggaggccattgcaaacatttatttcgtaggttgcccatgaacaactgtaatcctattagcgcaaacacgcttagacagaacacagtcaagatcatgacatcagaaagcttcttcactgactggatcagggcccccacaatggtcttcaggcctggaatgactgaaattgttttcaatgctcggagaactctgaatgttctcaacgctgagacattgcccaggtccacaaactctgtcacatatgcaaaagtaatgactgtgaaatccaaccaattccatggatcccgtaaaaatgtgaaatcttctaaacaaaagccccttgcaagtattttaataagtgattcaaaagtataaattcctgtaaaggtatactccacattctttgtccagtctggagggttactcatggtcataaatacacagttggtaagaatagtgcacataatgagcatattgaataaagaatgtaccaaaatcttaatagctaattttctaatagggttgaagggagttaaaatgtaaagggcgggggtggcactgaatcgagagattgctttccctttattcaatactataaacgttttcttattgatatagtaggggtccagatcctccaggggcactgacaccatctctggaggaatgtctccataaataaatggaagagattttcctgcttccaagtcactgtttggctttgggccattttcatcatcctcatccttgcgttcctgtttgggtctcttagctttctcttctgcaatgcgttgttcaatagcagcaagggattccctggtaaagaagcggaagctgtcaggtcctggcggtaccagcactgactgtgccatcttttcatcctgctcctttaatcactgtttagctccttgcataagaaagtgctgaaataaagaaaaatgtaaatcataacacagaatccacgtatgtgttgaatataatagtcttcaatgcaattcttcagaatttttactggagtagaaagtaaaatctcacatgtattctatcctcattaaagaagaaaaaaacaagaaaggatgaccacagcatcctccctcctttaccttagctttctgttctgacactcattcgatggtacccaatgtctgttagaaaacag

SEQ ID NO: 51 - RNA, 9933 nt, Homo sapiens
  source 1..9933: mol_type = mRNA
gagccgagctgagcctcgcctagctccggcagcctcagcttcagcaccagccgcaccggagcccggaccgcagccactaagggcagcggcggcggcgggagccaggcgcgcagctagcagcggcgcggtcgggaagcagcagccgccgccgccgccgccgccgccgcgacgggcagctgggctcgccggcagccggctcgggcccctaccctctcggctacgtgtctccggcgccgggcggccggcgagtctggagcccgcgccgtcgccggccgcgtcctccgggcatggaaggaggcggcaagcccaactcttcgtctaacagccgggacgatggcaacagcgtcttccccgccaaggcgtccgcgacgggcgcggggccggccgcggccgagaagcgcctgggcaccccgccggggggcggcggggccggcgcgaaggagcacggcaactccgtgtgcttcaaggtggacggcggtggcggcggtggcggcggcggcggcggcggcgaggagccggcggggggcttcgaagacgccgaggggccccggcggcagtacggcttcatgcagaggcagttcacctccatgctgcagcccggggtcaacaaattctccctccgcatgtttgggagccagaaggcggtggaaaaggagcaggaaagggttaaaactgcaggcttctggattatccacccttacagtgatttcaggttttactgggatttaataatgcttataatgatggttggaaatctagtcatcataccagttggaatcacattctttacagagcaaacaacaacaccatggattattttcaatgtggcatcagatacagttttcctattggacctgatcatgaattttaggactgggactgtcaatgaagacagttctgaaatcatcctggaccccaaagtgatcaagatgaattatttaaaaagctggtttgtggttgacttcatctcatccatcccagtggattatatctttcttattgtagaaaaaggaatggattctgaagtttacaagacagccagggcacttcgcattgtgaggtttacaaaaattctcagtctcttgcgtttattacgactttcaaggttaattagatacatacatcaatgggaagagatattccacatgacatatgatctcgccagtgcagtggtgagaatttttaatctcatcggcatgatgctgctcctgtgccactgggatggttgtcttcagttcttagtaccactactgcaggacttcccaccagattgctgggtgtctttaaatgaaatggttaatgattcttggggaaagcagtattcatacgcactcttcaaagctatgagtcacatgctgtgcattgggtatggagcccaagccccagtcagcatgtctgacctctggattaccatgctgagcatgatcgtcggggccacctgctatgccatgtttgtcggccatgccaccgctttaatccagtctctggattcttcgaggcggcagtatcaagagaagtataagcaagtggaacaatacatgtcattccataagttaccagctgatatgcgtcagaagatacatgattactatgaacacagataccaaggcaaaatctttgatgaggaaaatattctcaatgaactcaatgatcctctgagagaggagatagtcaacttcaactgtcggaaactggtggctacaatgcctttatttgctaatgcggatcctaattttgtgactgccatgctgagcaagttgagatttgaggtgtttcaacctggagattatatcatacgagaaggagccgtgggtaaaaaaatgtatttcattcaacacggtgttgctggtgtcattacaaaatccagtaaagaaatgaagctgacagatggctcttactttggagagatttgcctgctgaccaaaggacgtcgtactgccagtgttcgagctgatacatattgtcgtctttactcactttccgtggacaatttcaacgaggtcctggaggaatatccaatgatgaggagagcctttgagacagttgccattgaccgactagatcgaataggaaagaaaaattcaattcttctgcaaaagttccagaaggatctgaacactggtgttttcaacaatcaggagaacgaaatcctcaagcagattgtgaaacatgacagggagatggtgcaggcaatcgctcccatcaattatcctcaaatgacaaccctgaattccacatcgtctactacgaccccgacctcccgcatgaggacacaatctccaccggtgtacacagcgaccagcctgtctcacagcaacctgcactcccccagtcccagcacacagaccccccagccatcagccatcctgtcaccctgctcctacaccaccgcggtctgcagccctcctgtacagagccctctggccgctcgaactttccactatgcctcccccaccgcctcccagctgtcactcatgcaacagcagccgcagcagcaggtacagcagtcccagccgccgcagactcagccacagcagccgtccccgcagccacagacacctggcagctccacgccgaaaaatgaagtgcacaagagcacgcaggcgcttcacaacaccaacctgacccgggaagtcaggccactctccgcctcgcagccctcgctgccccatgaggtgtccactctgatttccagacctcatcccactgtgggcgagtccctggcctccatccctcaacccgtgacggcggtccccggaacgggccttcaggcagggggcaggagcactgtcccgcagcgcgtcaccctcttccgacagatgtcgtcgggagccatccccccgaaccgaggagtccctccagcaccccctccaccagcagctgctcttccaagagaatcttcctcagtcttaaacacagacccagacgcagaaaagccacgatttgcttcaaatttatgatccctgctgattgtcaaagcagaaagaaatactctcataaactgagactatactcagatcttattttattctatctcctgatagatccctctagcctactatgaagagatattttagacagctgtggcctacacgtgaaatgtaaaaatatatatacatatactataaaatatatatctaaattcccaagagagggtcaaaagacctgtttagcattcagtgttatatgtcttcctttctttaaatcattaaaggatttaaaatgtcgttgtaagattatttatttctaacctacttttacttaagtcctttgatatgtatatttctctattttatgaagagttcttggattcaatggaaacaaaactgattttaaaaaggcaactcaaatgaactagtaaatagcaccaatcaaaactttctttcattagctgtgtctctgcatctaaattgttaatcattaatggtggagaattaaataacaaatcccattttatagatctaaattgtatttcggtgctttcaatttcaaattaggttaaagaatgcactacttgcttggccaccgtaggagactagcattgccactgtttgttaagaatatcactaacctcaaacatgttcattgatctttcagaaagctgagggaaaattaatatttgtcttcatgtgttatcggacttttaccaagactcgatcaatgttagttgtaaataactttttcaacccaaataaaaatagctattctgtgttgtatgaaggtaaaagtcattgtttaagaatttagttttattgcttcacttcaaaacttagagttttaaattttacaaaacctgattgtgagaattattcaattgtaatgcaatggcttgaaacctacaatattattttaacctgcaatgttttatgcaaaattgtatgctcgaatctacaaattgcttgtattacaccaaaaatcgttacttttctttcttcttgccataatcaagcatctgaaaatagtccctgcatgcttctggggaaaaaaaaataggttcaaatcagtcattgtagagaaaggcttacagtatttctcgtttctagaaaagcataacaattcattaattgcctatcttataattcctataaggctgacttggatctctgacttaagtctagaagtgaggttttcacttttatttaatattattgctattattatttaaataattatttgtaaaccacagcttgatttggagttaagtgttgtctgtgtcttcactgtagctggtaatttactatggtattaatttaaagaaataaattcaatacagcatcacgtctgtttgggaacacacattttgctctatgtatattgtaactaaatggttagtaaactttaaggcatgtggtgactaacgtagcccttagataggaggtttgtcatttttaatgtgttgaaaatagtacagacatggtgacagaaagcaggggtaaagttgaacgtctatgagcattgtctgtctgttttcttaactctttacatgatctgtgagcacctgcttcttctcaaagaactcccttagtaatcatttgtgcctaatgcatcccacacatgtggagtatgactggaacacaattgaaagattcctaacaactggctgcggtaaataacccaagttaagagcatgacttaaagtggaggtcttcagtatctctggcactggcaatacatttaagaacatacagagatcacacattatgtgggacagggcctgcagatagacttgaggacagaaaacaaaaacaaaagcagaaactctaaagtggatccttgctgcctgttatgccttttgtggatataatacctataataccaaaatgagttgttatgtttaatttcaaacaaatcccaactggtgtggaagtaattaactgctagtcgatgtaatgtaatcatcaatatgctggtgacatatgatggcatgtcaggaatactgttgtaagaaagggattgttcagtctacctagaacctatgggaaagctgcaagaccatttacatatcagtacaaaactcctttattttattaaaatatgagaattaacttcaatttattaagattacgtattggtcctttaaattattaaaggtttacatttgataggattaatggatttggtagtgaaatatttttatatatataaatttttggttttttattttgagcactattgggaaacataagcaaaattgaaatgcatggtctttcagtgcaaccatacaatttttattcactttgtaatagaatggacaaaaaaactaaggtttatatattaaactaataaaaaggtacagggtaaattatatacatatatgtatgaatgtatatatacttagattaagaaaaaaaaatgactcacattcctgtaatataaaggtccattgctagttgaaaagtgacctcttttctctgtacatagtgaagcccgtatgtatggagttttaatctgtacagaaagaaatgtattattcattggtctttctgctgctggaaagataatagaatagctgattcttacaacaactgtatgatcagggatgagttagagtatttcttttgtctttgctcaaagccatacatatataaatatatataaagattattaataaattcaacaaaaaataaactacaatcatgaatattttattttatcaatatatgctaatcaaatgttttattttattaatgagtacagctttgcctctatttttacatcataaaatttccaagagcttatacttgataatcacataaaatcaattatattctataattctggaatgagaggactttaaatagaacatggatttttcaaccacttctttgtttacctttttcgtatagtaaaatatgagcttattttcttttttgctctgtgcctttttagaatgtggttgttctccaacttcaaaacacaaccattttgtgtaattattggatatacagatgagaaataattttcctgtaataatggtaaataattgtcctgtaatatatttatacaaacctattttgttataatagttctatgacatacctattttgttataatagttttataacatacctattttgttataatagggccttgggctctattataacaaaacaggtttatataaatacattcatatttatagccttaaacaaaataggtttgtatagtaggcccaaggccctattataacaaaataggtttgtataaatatattcatatttatagccttgggccctgcaaagttatttggagagtgatagaacctccccacacaagtgggttttaaatgatacctaaaagcctgagatagagtttatcataatgagaataagtagtgaagcattcctgaaaacaaggaggataaatagtagcaatggcaatatattctattcaccaaaaaagtagcttgtctccaggtctggatgacctcttcataagtgaacaattccctgatgaatgctgttccactttaaagagatggttattttgcaatttataaacttaactgagcatactattttcaggacactacaaagtacatagtcaagttattaccgtcattcctataggacagagaatgatttaaacaatatgacatgtttaaaattttagatgatttatttcaaatcctgaattatgtctacttcaaattatgagcaatctctattatctttcaggactatttaaaaaatctccatacctcctctttcagcttaggtttttatatttgttaattttactatgttactttgcttctatggccctcacttgcactgtttataatgttaacctgtttgaatgagatatctctccattatatctttatctttttagaacatgtgccataaaacccatgtggttattttgttcatatgcactacaactagcaaacttttattttatgttcacctactttaaaaagtactcatactgtaccatgggaaagaaacatgggccttatagaatggaatgctgagctattttgagtcctgaaaacaatggccaaaaatttaaggaactgtggttgctgcatgcaccaaattgtagcacatacaaataaataaaatacagttctataactgtattcaatatggttattttcaaggaaaaataggatagaaattttctttgaaagatttgctattgtacttagggaagtacacctgctattacccctcaaaagcaatgactttcttaagcaatttcaatttttttcctttttaacaaccctgcacttgcacaaccctgcatctcttgtctcaccctaatgctgaccctgcttccaattcaggctttgacagggacaaatggagattttaaggttttttaatgagagaagccttgctgacactccccgcatcccaccttgaaaattatttaaagatgatcttaaaagaacctacagataatgctctgaatttgtttacaaggtccttgatgtggagagaatgagtaatacattaaatgctggggaaataattatcatttagtgaaaaattaagcatgcttttctaaaatgtggatgtttaacagagcacagctgattgggaacactggcagttcaatgcagctggagtgtctcacagggtgaagaggaacccagatcaagtgggaaatagggatttcaaaaaccttctgaaaggcttttaacatcagggcaaaggttttacagtgttgtactttatattcttaatttaagcttatcaacggggaggattcacattgaaatgtctgttttgctaatgtaacaaggaataaaataatttatgacacagcaaaaactgggggctatttacaaccccaccctgccttgtgaggatgctgggtcctaaggaaggtcctaggtttgctaaatagagtaatgggaataggaaactgaaagtttacttgctttgcgtaagataatatattgcggcagggaaggggtacaagaagataagagctagaacctgtgagaagggaaagaagtgataaaataattttggctaaaataaagcaagttctcaggccaggcgtggtggctcatgcctgtaatcctagcactttgggaggccaaagtgggaggaatgcttgaggccaggaattggagaccaaccagggcagcatgtcaagacctggtctctacaaggaaaaaaaatttttttaattgaccagtatatacttacatacctgcagtgtttagaaaacccgactataggtggtgtattcctgtagtcctagttactcagaaagttaaggcaggaggatcgcttgaacttaggaggtcaaggctgcagtgagccctgttcgttccactgcactccagcttgggggacagagcaaaaccctttctcaagaaaaacccaaacaaacaaaaaagtgaagccagttctttaatttctattggagatatcacacacgctccaaagagtggcaaaggtgaacattctttggagctattatatttctaatgtaacatcaatggccatttactcccaaagggaaacatctttttttttttttttttttaagatggagtctggctctgtcacccaggtgggagtgcaatggcaggatcttggcccactgcaacatcagcctcccaggtttaagcaattctcctgcatcagcctccagagtagctgggattacaggtgcccgccaccatggctagctaaatttttgtaatttttagtagagacagggttttaccatgttggccaggccggtctcgaacccctaacctcaagtgatccgcccgcctcaccctccagaagtgctaggattacaggcctgagccaccgcacccggccctgctatttttttctatgtagttgtttcagtaataccatatgagcagagaatactattgattcattcaattgaagaaatctgaataaattagtaaatataataattcttcaaaagaggaccactttatgtttccaatagattatataattgaattcaggtaacgtagagttattcagacttttttttttaaataacggaattttgcaaaaaaacaggttgcatcgttttctacagagaatattcagatgtgtagaggcaaagagactttcttgaaaggtttttatttcctgttaaatttgtgaggaaaactcctgagaaaggaaagatttacttttgaaggaagaaagaacataacccaaagaaatttgaaagattcaaaaagagttttccaaatgtattctcatttctttctcatatttgttcaaggtcttagtttccaagcattcaaaattaaatcttgtttgcctaactcttctaacatctattaccaacctaacatattacaattctgtttaaaatgtgcagttctaaatgttcttgcgtgcctcactgtggaaagtgtggtgcatggaactgcagcgtcagtatcacccagaagtataattacaagaagtgcagagtccttggccttaccctgtacctacagaagtccgcttttgggcaagatccccagatgattcatatgtgtattaatattgaaaaaattggaactagtaagtcctagaggaggtaaattttaagggctttttaagggaacttccaagtgtgaagacatttctggagatgacaagtcaacatagcatgggatcttggctagacaaggaaagcgagagaacattaaataaacacaagcaacgacaaaccacctatgttataattttatcctggaccatccaaagtttactcttggtcacgctgtctaacccagcctgcctcctggcacttgctagttagaaccagggaagagaaaactaatatgtgttaggtattataatttccttatgtcacataaattttggtgccatagctagcaatgtttcttaatatcacatcagtacaatgtgtccattgccttctgtaacatttttaatgctatcaataatacattgacattataaaaataaatgaatgtggtcaata

SEQ ID NO: 52 - RNA, 9933 nt, Homo sapiens
  source 1..9933: mol_type = mRNA
tattgaccacattcatttatttttataatgtcaatgtattattgatagcattaaaaatgttacagaaggcaatggacacattgtactgatgtgatattaagaaacattgctagctatggcaccaaaatttatgtgacataaggaaattataatacctaacacatattagttttctcttccctggttctaactagcaagtgccaggaggcaggctgggttagacagcgtgaccaagagtaaactttggatggtccaggataaaattataacataggtggtttgtcgttgcttgtgtttatttaatgttctctcgctttccttgtctagccaagatcccatgctatgttgacttgtcatctccagaaatgtcttcacacttggaagttcccttaaaaagcccttaaaatttacctcctctaggacttactagttccaattttttcaatattaatacacatatgaatcatctggggatcttgcccaaaagcggacttctgtaggtacagggtaaggccaaggactctgcacttcttgtaattatacttctgggtgatactgacgctgcagttccatgcaccacactttccacagtgaggcacgcaagaacatttagaactgcacattttaaacagaattgtaatatgttaggttggtaatagatgttagaagagttaggcaaacaagatttaattttgaatgcttggaaactaagaccttgaacaaatatgagaaagaaatgagaatacatttggaaaactctttttgaatctttcaaatttctttgggttatgttctttcttccttcaaaagtaaatctttcctttctcaggagttttcctcacaaatttaacaggaaataaaaacctttcaagaaagtctctttgcctctacacatctgaatattctctgtagaaaacgatgcaacctgtttttttgcaaaattccgttatttaaaaaaaaaagtctgaataactctacgttacctgaattcaattatataatctattggaaacataaagtggtcctcttttgaagaattattatatttactaatttattcagatttcttcaattgaatgaatcaatagtattctctgctcatatggtattactgaaacaactacatagaaaaaaatagcagggccgggtgcggtggctcaggcctgtaatcctagcacttctggagggtgaggcgggcggatcacttgaggttaggggttcgagaccggcctggccaacatggtaaaaccctgtctctactaaaaattacaaaaatttagctagccatggtggcgggcacctgtaatcccagctactctggaggctgatgcaggagaattgcttaaacctgggaggctgatgttgcagtgggccaagatcctgccattgcactcccacctgggtgacagagccagactccatcttaaaaaaaaaaaaaaaaaaagatgtttccctttgggagtaaatggccattgatgttacattagaaatataatagctccaaagaatgttcacctttgccactctttggagcgtgtgtgatatctccaatagaaattaaagaactggcttcacttttttgtttgtttgggtttttcttgagaaagggttttgctctgtcccccaagctggagtgcagtggaacgaacagggctcactgcagccttgacctcctaagttcaagcgatcctcctgccttaactttctgagtaactaggactacaggaatacaccacctatagtcgggttttctaaacactgcaggtatgtaagtatatactggtcaattaaaaaaattttttttccttgtagagaccaggtcttgacatgctgccctggttggtctccaattcctggcctcaagcattcctcccactttggcctcccaaagtgctaggattacaggcatgagccaccacgcctggcctgagaacttgctttattttagccaaaattattttatcacttctttcccttctcacaggttctagctcttatcttcttgtaccccttccctgccgcaatatattatcttacgcaaagcaagtaaactttcagtttcctattcccattactctatttagcaaacctaggaccttccttaggacccagcatcctcacaaggcagggtggggttgtaaatagcccccagtttttgctgtgtcataaattattttattccttgttacattagcaaaacagacatttcaatgtgaatcctccccgttgataagcttaaattaagaatataaagtacaacactgtaaaacctttgccctgatgttaaaagcctttcagaaggtttttgaaatccctatttcccacttgatctgggttcctcttcaccctgtgagacactccagctgcattgaactgccagtgttcccaatcagctgtgctctgttaaacatccacattttagaaaagcatgcttaatttttcactaaatgataattatttccccagcatttaatgtattactcattctctccacatcaaggaccttgtaaacaaattcagagcattatctgtaggttcttttaagatcatctttaaataattttcaaggtgggatgcggggagtgtcagcaaggcttctctcattaaaaaaccttaaaatctccatttgtccctgtcaaagcctgaattggaagcagggtcagcattagggtgagacaagagatgcagggttgtgcaagtgcagggttgttaaaaaggaaaaaaattgaaattgcttaagaaagtcattgcttttgaggggtaatagcaggtgtacttccctaagtacaatagcaaatctttcaaagaaaatttctatcctatttttccttgaaaataaccatattgaatacagttatagaactgtattttatttatttgtatgtgctacaatttggtgcatgcagcaaccacagttccttaaatttttggccattgttttcaggactcaaaatagctcagcattccattctataaggcccatgtttctttcccatggtacagtatgagtactttttaaagtaggtgaacataaaataaaagtttgctagttgtagtgcatatgaacaaaataaccacatgggttttatggcacatgttctaaaaagataaagatataatggagagatatctcattcaaacaggttaacattataaacagtgcaagtgagggccatagaagcaaagtaacatagtaaaattaacaaatataaaaacctaagctgaaagaggaggtatggagattttttaaatagtcctgaaagataatagagattgctcataatttgaagtagacataattcaggatttgaaataaatcatctaaaattttaaacatgtcatattgtttaaatcattctctgtcctataggaatgacggtaataacttgactatgtactttgtagtgtcctgaaaatagtatgctcagttaagtttataaattgcaaaataaccatctctttaaagtggaacagcattcatcagggaattgttcacttatgaagaggtcatccagacctggagacaagctacttttttggtgaatagaatatattgccattgctactatttatcctccttgttttcaggaatgcttcactacttattctcattatgataaactctatctcaggcttttaggtatcatttaaaacccacttgtgtggggaggttctatcactctccaaataactttgcagggcccaaggctataaatatgaatatatttatacaaacctattttgttataatagggccttgggcctactatacaaacctattttgtttaaggctataaatatgaatgtatttatataaacctgttttgttataatagagcccaaggccctattataacaaaataggtatgttataaaactattataacaaaataggtatgtcatagaactattataacaaaataggtttgtataaatatattacaggacaattatttaccattattacaggaaaattatttctcatctgtatatccaataattacacaaaatggttgtgttttgaagttggagaacaaccacattctaaaaaggcacagagcaaaaaagaaaataagctcatattttactatacgaaaaaggtaaacaaagaagtggttgaaaaatccatgttctatttaaagtcctctcattccagaattatagaatataattgattttatgtgattatcaagtataagctcttggaaattttatgatgtaaaaatagaggcaaagctgtactcattaataaaataaaacatttgattagcatatattgataaaataaaatattcatgattgtagtttattttttgttgaatttattaataatctttatatatatttatatatgtatggctttgagcaaagacaaaagaaatactctaactcatccctgatcatacagttgttgtaagaatcagctattctattatctttccagcagcagaaagaccaatgaataatacatttctttctgtacagattaaaactccatacatacgggcttcactatgtacagagaaaagaggtcacttttcaactagcaatggacctttatattacaggaatgtgagtcatttttttttcttaatctaagtatatatacattcatacatatatgtatataatttaccctgtacctttttattagtttaatatataaaccttagtttttttgtccattctattacaaagtgaataaaaattgtatggttgcactgaaagaccatgcatttcaattttgcttatgtttcccaatagtgctcaaaataaaaaaccaaaaatttatatatataaaaatatttcactaccaaatccattaatcctatcaaatgtaaacctttaataatttaaaggaccaatacgtaatcttaataaattgaagttaattctcatattttaataaaataaaggagttttgtactgatatgtaaatggtcttgcagctttcccataggttctaggtagactgaacaatccctttcttacaacagtattcctgacatgccatcatatgtcaccagcatattgatgattacattacatcgactagcagttaattacttccacaccagttgggatttgtttgaaattaaacataacaactcattttggtattataggtattatatccacaaaaggcataacaggcagcaaggatccactttagagtttctgcttttgtttttgttttctgtcctcaagtctatctgcaggccctgtcccacataatgtgtgatctctgtatgttcttaaatgtattgccagtgccagagatactgaagacctccactttaagtcatgctcttaacttgggttatttaccgcagccagttgttaggaatctttcaattgtgttccagtcatactccacatgtgtgggatgcattaggcacaaatgattactaagggagttctttgagaagaagcaggtgctcacagatcatgtaaagagttaagaaaacagacagacaatgctcatagacgttcaactttacccctgctttctgtcaccatgtctgtactattttcaacacattaaaaatgacaaacctcctatctaagggctacgttagtcaccacatgccttaaagtttactaaccatttagttacaatatacatagagcaaaatgtgtgttcccaaacagacgtgatgctgtattgaatttatttctttaaattaataccatagtaaattaccagctacagtgaagacacagacaacacttaactccaaatcaagctgtggtttacaaataattatttaaataataatagcaataatattaaataaaagtgaaaacctcacttctagacttaagtcagagatccaagtcagccttataggaattataagataggcaattaatgaattgttatgcttttctagaaacgagaaatactgtaagcctttctctacaatgactgatttgaacctatttttttttccccagaagcatgcagggactattttcagatgcttgattatggcaagaagaaagaaaagtaacgatttttggtgtaatacaagcaatttgtagattcgagcatacaattttgcataaaacattgcaggttaaaataatattgtaggtttcaagccattgcattacaattgaataattctcacaatcaggttttgtaaaatttaaaactctaagttttgaagtgaagcaataaaactaaattcttaaacaatgacttttaccttcatacaacacagaatagctatttttatttgggttgaaaaagttatttacaactaacattgatcgagtcttggtaaaagtccgataacacatgaagacaaatattaattttccctcagctttctgaaagatcaatgaacatgtttgaggttagtgatattcttaacaaacagtggcaatgctagtctcctacggtggccaagcaagtagtgcattctttaacctaatttgaaattgaaagcaccgaaatacaatttagatctataaaatgggatttgttatttaattctccaccattaatgattaacaatttagatgcagagacacagctaatgaaagaaagttttgattggtgctatttactagttcatttgagttgcctttttaaaatcagttttgtttccattgaatccaagaactcttcataaaatagagaaatatacatatcaaaggacttaagtaaaagtaggttagaaataaataatcttacaacgacattttaaatcctttaatgatttaaagaaaggaagacatataacactgaatgctaaacaggtcttttgaccctctcttgggaatttagatatatattttatagtatatgtatatatatttttacatttcacgtgtaggccacagctgtctaaaatatctcttcatagtaggctagagggatctatcaggagatagaataaaataagatctgagtatagtctcagtttatgagagtatttctttctgctttgacaatcagcagggatcataaatttgaagcaaatcgtggcttttctgcgtctgggtctgtgtttaagactgaggaagattctcttggaagagcagctgctggtggagggggtgctggagggactcctcggttcggggggatggctcccgacgacatctgtcggaagagggtgacgcgctgcgggacagtgctcctgccccctgcctgaaggcccgttccggggaccgccgtcacgggttgagggatggaggccagggactcgcccacagtgggatgaggtctggaaatcagagtggacacctcatggggcagcgagggctgcgaggcggagagtggcctgacttcccgggtcaggttggtgttgtgaagcgcctgcgtgctcttgtgcacttcatttttcggcgtggagctgccaggtgtctgtggctgcggggacggctgctgtggctgagtctgcggcggctgggactgctgtacctgctgctgcggctgctgttgcatgagtgacagctgggaggcggtgggggaggcatagtggaaagttcgagcggccagagggctctgtacaggagggctgcagaccgcggtggtgtaggagcagggtgacaggatggctgatggctggggggtctgtgtgctgggactgggggagtgcaggttgctgtgagacaggctggtcgctgtgtacaccggtggagattgtgtcctcatgcgggaggtcggggtcgtagtagacgatgtggaattcagggttgtcatttgaggataattgatgggagcgattgcctgcaccatctccctgtcatgtttcacaatctgcttgaggatttcgttctcctgattgttgaaaacaccagtgttcagatccttctggaacttttgcagaagaattgaatttttctttcctattcgatctagtcggtcaatggcaactgtctcaaaggctctcctcatcattggatattcctccaggacctcgttgaaattgtccacggaaagtgagtaaagacgacaatatgtatcagctcgaacactggcagtacgacgtcctttggtcagcaggcaaatctctccaaagtaagagccatctgtcagcttcatttctttactggattttgtaatgacaccagcaacaccgtgttgaatgaaatacatttttttacccacggctccttctcgtatgatataatctccaggttgaaacacctcaaatctcaacttgctcagcatggcagtcacaaaattaggatccgcattagcaaataaaggcattgtagccaccagtttccgacagttgaagttgactatctcctctctcagaggatcattgagttcattgagaatattttcctcatcaaagattttgccttggtatctgtgttcatagtaatcatgtatcttctgacgcatatcagctggtaacttatggaatgacatgtattgttccacttgcttatacttctcttgatactgccgcctcgaagaatccagagactggattaaagcggtggcatggccgacaaacatggcatagcaggtggccccgacgatcatgctcagcatggtaatccagaggtcagacatgctgactggggcttgggctccatacccaatgcacagcatgtgactcatagctttgaagagtgcgtatgaatactgctttccccaagaatcattaaccatttcatttaaagacacccagcaatctggtgggaagtcctgcagtagtggtactaagaactgaagacaaccatcccagtggcacaggagcagcatcatgccgatgagattaaaaattctcaccactgcactggcgagatcatatgtcatgtggaatatctcttcccattgatgtatgtatctaattaaccttgaaagtcgtaataaacgcaagagactgagaatttttgtaaacctcacaatgcgaagtgccctggctgtcttgtaaacttcagaatccattcctttttctacaataagaaagatataatccactgggatggatgagatgaagtcaaccacaaaccagctttttaaataattcatcttgatcactttggggtccaggatgatttcagaactgtcttcattgacagtcccagtcctaaaattcatgatcaggtccaataggaaaactgtatctgatgccacattgaaaataatccatggtgttgttgtttgctctgtaaagaatgtgattccaactggtatgatgactagatttccaaccatcattataagcattattaaatcccagtaaaacctgaaatcactgtaagggtggataatccagaagcctgcagttttaaccctttcctgctccttttccaccgccttctggctcccaaacatgcggagggagaatttgttgaccccgggctgcagcatggaggtgaactgcctctgcatgaagccgtactgccgccggggcccctcggcgtcttcgaagccccccgccggctcctcgccgccgccgccgccgccgccaccgccgccaccgccgtccaccttgaagcacacggagttgccgtgctccttcgcgccggccccgccgccccccggcggggtgcccaggcgcttctcggccgcggccggccccgcgcccgtcgcggacgccttggcggggaagacgctgttgccatcgtcccggctgttagacgaagagttgggcttgccgcctccttccatgcccggaggacgcggccggcgacggcgcgggctccagactcgccggccgcccggcgccggagacacgtagccgagagggtaggggcccgagccggctgccggcgagcccagctgcccgtcgcggcggcggcggcggcggcggcggctgctgcttcccgaccgcgccgctgctagctgcgcgcctggctcccgccgccgccgctgcccttagtggctgcggtccgggctccggtgcggctggtgctgaagctgaggctgccggagctaggcgaggctcagctcggctc

SEQ ID NO: 53 - RNA, 7911 nt, Mus musculus
  source 1..7911: mol_type = mRNA
aatgtcacgctgggcagaagtggcacaggcgagcggcggggcgcgcgcgggtagaggcggtctgcggccagcagggggcagccgaggggcggcgctggcgcgcgggtgccgagcggaggagcctcgccccgcgcccgcagcctcagcctcagcctcagtaccaggcgcggcggagcccggagcgcggcagagccggcagcgcagccactgagggcagcggcggcggcgggagccaggcgcgcagcggagcagcgggcgggcgggaagcagtagccgccgccgccgctgccgccgcgacgggcagccggctccggcccctgctccttggcttcgagcccccggcgagtctggagcccgcgccgtcgccggtcgcgtcctccgggcatggaaggcggcggcaaacccaactccgcgtccaacagccgcgacgatggcaacagcgtcttcccctccaaggcgcccgcgacggggccggtggcggccgacaagcgcctggggaccccgccggggggcggcgcggccgggaaggaacatggcaactccgtgtgcttcaaggtggacggcggcggaggagaggagccggcgggcagcttcgaggatgccgaggggccccggcggcagtatggtttcatgcagaggcagttcacctccatgctgcagcctggggtcaacaaattctccctccgcatgtttgggagccagaaggcggtggagaaggagcaggaaagggttaaaactgcaggcttctggattatccatccgtacagtgacttcaggttttattgggatttaatcatgcttataatgatggttggaaatttggtcatcataccagttggaatcacgttcttcacagagcagacgacaacaccgtggattattttcaacgtggcatccgatactgttttcctgttggacttaatcatgaattttaggactgggactgtcaatgaagacagctcggaaatcatcctggaccctaaagtgatcaagatgaattatttaaaaagctggtttgtggtggacttcatctcatcgatcccggtggattatatctttctcattgtagagaaagggatggactcagaagtttacaagacagccagagcacttcgtatcgtgaggtttacaaaaattctcagtctcttgcggttattacgcctttcaaggttaatcagatacatacaccagtgggaagagatattccacatgacctatgacctcgccagtgctgtggtgaggatcttcaacctcattggcatgatgctgcttctgtgccactgggatggctgtcttcagttcctggttcccctgctgcaggacttcccaccagattgctgggtttctctgaatgaaatggttaatgattcctggggaaaacaatattcctacgcactcttcaaagctatgagtcacatgctgtgcattggttatggcgcccaagcccctgtcagcatgtctgacctctggattaccatgctgagcatgattgtgggcgccacctgctacgcaatgtttgttggccatgccacagctttgatccagtctttggactcttcaaggaggcagtatcaagagaagtataagcaagtagagcaatacatgtcattccacaagttaccagctgacatgcgccagaagatacatgattactatgagcaccgataccaaggcaagatcttcgatgaagaaaatattctcagtgagcttaatgatcctctgagagaggaaatagtcaacttcaactgccggaaactggtggcaactatgcctctttttgctaacgccgatcccaatttcgtgacggccatgctgagcaagctgagatttgaggtgttccagcccggagactatatcattcgagaaggagctgtggggaagaaaatgtatttcatccagcacggtgttgctggcgttatcaccaagtccagtaaagaaatgaagctgacagatggctcttacttcggagagatatgcctgctgaccaagggccggcgcactgccagtgtccgagctgatacctactgtcgtctttactccctttcggtggacaatttcaatgaggtcttggaggaatatccaatgatgagaagagcctttgagacagttgctattgaccgactcgatcggataggcaagaaaaactctattctcctgcagaagttccagaaggatctaaacactggtgttttcaacaaccaggagaacgagatcctgaagcagatcgtgaagcatgaccgagagatggtacaagctatccctccaatcaactatcctcaaatgacagccctcaactgcacatcttcaaccaccaccccaacctcccgcatgaggacccaatctccgccagtctacaccgcaaccagcctgtctcacagcaatctgcactcacccagtcccagcacacagacgccccaaccctcagccatcctttcaccctgctcctataccacagcagtctgcagtcctcctatacagagccccctggccacacgaactttccattatgcctctcccactgcgtcccagctgtcactcatgcagcagcctcagcagcaactaccgcagtcccaggtacagcagactcagactcagactcagcagcagcagcagcaacagcagcagcagcagcagcagcaacagcaacaacagcagcagcagcagcagcagcagcagcagcagcagcagcagcagcagcagcagcagcagccacagacacctggtagctccacaccgaaaaatgaagtgcacaagagcacacaagcccttcataacaccaacctgaccaaagaagtcaggcccctttccgcctcgcagccttctctgccccatgaggtctccactttgatctccagacctcatcccactgtgggcgaatccctggcctctatccctcaacccgtggcagcagtccacagcactggccttcaggcagggagcaggagcacagtgccacaacgtgtcaccttgttccgacagatgtcctcgggagccatcccccccaaccgaggagtgcctccagcaccccctccaccagcagctgtgcagagagagtctccctcagtcctaaatacagacccagatgcagaaaaaccccgttttgcttcgaatttatgattcttgatgattgtcaaagcagaaaagaagtactctaataaacagaatattctcagatattattttattctatctcacgatagatccctatagcctactctgaaaaaaaaatattttagaagctgtggcctacatgcaaatgtaaaaacatatatacatatataattaaatatatatatatatatatatatctaaatgcccaagagaagttcaaaagacttgtataacattcagtgttacatgtcttcctctctttaaaaccattaaaggatttaacacattgttgtaaggtcattgatttctaaccttttacttgattcctttgatatatgtgtttctcccttttatgaagagttcttggagtcaatggaaacaaaactcttgattttaaaaaaggcaactccaattagatccagcatagcaccaatcaaagctttctttcattagctgtgcctctgcgtctaggttgttaattatgcgggattcaataaacaaatcccagtttatagctctcaattgtattttggtgctttaaattttgagttaggtgaaggaacacgctccatgctcagccaccgtaggagactaacattgccattaaggcttcctctaacctcaaacatgttcattgattttgtgagaaaagtgaggagatatttgtcttcatgtgtcactggacttttaccaagacgcagtcaatgttagctgtaaataactttcccagcccgaattaaagtaactattctgtgttgtagaaaggtaaaagtcagtgtttaagaatttagttttactgcttcacttcaaaagttagagttttaaatttcacaaaacactctaattgtgacagctgttcaaatgtaatgcaatggcttgagacctacaatatcatttttaacctgcgatactttaatgcaaaaattgtatgcttgaacctacaaattgcttgtatgacaccaaaaatcattacttttattccttcttgacataatcaagcacctgaacctggtcctggcatgctttcgggggcaaaaaaaaataaaataaaataacttaaaaaaaaaagtagattcaaatcaatcattgtaagaaaaggctgacagtatttctcacttctagatgagtataactattcattaattgcctctcttaaaattcttaaaaggctgacttggatctctgacttaaatctagaagtgaggttttcactttcatttgatattgttgctgttcttattgtttaagcaatcatttgcaaaccatagcttgttttggagttaaaggtgttatgtgtcttcatgttagttggtagtttattgtgatgttaatgtgaagaaataaatactatatatcaccacatctgtttggaaatacacattttgccctttgtatattgtaactaagcagttagtaaatcttaaggcatgtggtaacctacatagtccttagatagacaggaggtttgttctttcaaatgtgctgaaacttatatggactccgtgaggggaagcaggggggaattgagctgtctgaaagcattgtctgtttgttcacttgtttccttaattctttctgtgagcatcatggagcctaatctagggaagtcccttagcgatcttgcttcatgtgtgtttgctgcacctcacacaagtggtgggtgagtagaacacagtagcaggctctctagtgcctgacttctgtacgtaactcaagagagtgagctgatatggaggtctttgacattacaggcacaaatgatctatttaagaacataaagaccatacattctattgggacagggcctccaggtatccttgaggaccaagaacaaaagtagaagcaagaggtttaaagtggatctacattgccttttatgaaaccaaaatgagtcgttgcacttaattgctaacggatcctaccttgtgtgaaacaatcagcaatgctaggtaacgtgatgtcattcctgtaatgctagtgaccaatggtatcctgttaggaatgatgtaagagagagatcctgcagcctacgtaaaatctatgggaaagttgcaagacctatcacatatcagtacaaaactcctttattttattaaatttaaaaattagcttcttgttaagatcatgtactagtcctttaaattattaaaggtctacctttggcaggattaatgcatttcgtagtaaaatatttttatatatcaattttttgagcactattggagaacatccgcaaaattgaattgcatggttattcagtgcaaccaataaaatttttattcactttgtactcgaatggacaaagaacactaaggtttatatgttaaagtaacaaaaccatacagggtatattaaatacacatatgtatgaatgtgtgtgtttgtaaaggtacagtgctaggagaacatgaccttttttctctgtacatagttaagctcaagtacggagttttaatctgtacgggaagagctgtattggggtcttttactgctgagaaagtagaacaataacttatactttgcactgtatgaccagggaagagttagagtatttcttttgtctttgctcaaagccatacatatataaatatatattaagattattaataaattcaaaagaaaataaaccaaattatgaatattttattttgttgttgaaatctaatcaaatgtttaactcattgaggagtacagatttgcttgttgttctctctttgtataatctccaaaaagatttgtttttgaaaatcaccatacaattgttatagaaattctacagatatagaatgaatgtaatttaaatagaacatagatgtctcagtcacctgtttgttttcctttttttcatatggtaacatttggttatcttattctttaccccatgcctctttagtatgtggtgtttctccagttttaaaatgcagccatgtctttgttattggatatggggatggtttttaattttcgtacatgacctgttttctctgggcttttcaaaggcctcagatgagatttgtcacaatgaggataaatagcaaagcagtcctaaacacaaggaggataaagtgtgattcttcaattggttgtcctcctcaaacacacagcctgactccagatctccgtgacctctccataagtgaatggttaccaagtggatgccattctacttttaaaagatgcttactctatcatttacagacttaaatgaacatgttattttaaggacactgcaaagaaagcagtcgctagtctaataattcctacacatacgaacaatttaaacaatatgatgagtttcaacttttagatacattatactaaaatcagaattagttatgattcaacatataagtcaccttgactccttgacaagattattgtgtaaaatacctccatatatttttatgacttgttttttatttggtaagtttactataattgctatttgggatcttactttccttatttttataatattaaactagatgactaaaatttttctcatttttatcttctccatccttgtagagcttgtatcatgccatgcaagtgtaggatatgttgttgttgctgctacagctgctgctattgttgttaatattcactaaccctaacaaaaattttctatatgataggtatatctacctaaatatccataagtctgtgccataagaaaaaaactatactcaagtattaaactacactgaattctgaatagtcaaaaattgtcacgaaacatgcagttgaatatgtggaccaaattatgtgggaatttttttaactttattcaaaatagttcctgaaatattttcaaaatcatgttggaaattttctttcgaggattttttttttttatcaatttaagggtgatttgtagttgctgtgaccacttgaaaatagtgactttctaaagcagttttatttcattttaataaataacacgtttttattcttttctcatatatttattctgatacaattttcccaaccccctcttcccccagcctcttccctcccccatcaccactctcttccatatccccacccctctcctggggaaaaggatcgacatttttattgcatgtattgatatcttcacaaacaggtcattttggccttgatcacatttatagctttcaggtaaaaacaaaaaacaaaaaacaaaaccataagcttctccatatagcaaaaatattcaggttgaataataaatctgtcaccacaataaatcctctcattctagttcaaaggatacgtctgtgatatttgctctgttgcttaatgctttgtgcagctctctcgatgaaatgttattactatcttttcttcatatggaaatagtctctgtaacacaaggtgatgaggaatgaagataaatttccaaaaaaaaaaaaaatctggaatgagataaatggtatatttgttccatgtacaaatgttgatgtctcaaaacaagacaagtgatgttttataaaatcaaaataagtgtgatggccataacccaagtattccattttaaattaagacgggacccaaccccgcaatcacgtgaacatgcctctcttatctcaccatgcctctcttatctcaccataatcctaccccagtttccctaaccaagggcggtgcatagcgacaagtgaagactggaaagactttgttgaaagaagccttgccaagacttggttttggcctatcatgagacttgttaaagatgataataaagggaaatgtatggaagtctattaatttatgtctgagatacttgatgtagaaagaataaaatttgaagaaagcacc

SEQ ID NO: 54 - RNA, 7911 nt, Mus musculus
  source 1..7911: mol_type = mRNA
ggtgctttcttcaaattttattctttctacatcaagtatctcagacataaattaatagacttccatacatttccctttattatcatctttaacaagtctcatgataggccaaaaccaagtcttggcaaggcttctttcaacaaagtctttccagtcttcacttgtcgctatgcaccgcccttggttagggaaactggggtaggattatggtgagataagagaggcatggtgagataagagaggcatgttcacgtgattgcggggttgggtcccgtcttaatttaaaatggaatacttgggttatggccatcacacttattttgattttataaaacatcacttgtcttgttttgagacatcaacatttgtacatggaacaaatataccatttatctcattccagattttttttttttttggaaatttatcttcattcctcatcaccttgtgttacagagactatttccatatgaagaaaagatagtaataacatttcatcgagagagctgcacaaagcattaagcaacagagcaaatatcacagacgtatcctttgaactagaatgagaggatttattgtggtgacagatttattattcaacctgaatatttttgctatatggagaagcttatggttttgttttttgttttttgtttttacctgaaagctataaatgtgatcaaggccaaaatgacctgtttgtgaagatatcaatacatgcaataaaaatgtcgatccttttccccaggagaggggtggggatatggaagagagtggtgatgggggagggaagaggctgggggaagagggggttgggaaaattgtatcagaataaatatatgagaaaagaataaaaacgtgttatttattaaaatgaaataaaactgctttagaaagtcactattttcaagtggtcacagcaactacaaatcacccttaaattgataaaaaaaaaaaatcctcgaaagaaaatttccaacatgattttgaaaatatttcaggaactattttgaataaagttaaaaaaattcccacataatttggtccacatattcaactgcatgtttcgtgacaatttttgactattcagaattcagtgtagtttaatacttgagtatagtttttttcttatggcacagacttatggatatttaggtagatatacctatcatatagaaaatttttgttagggttagtgaatattaacaacaatagcagcagctgtagcagcaacaacaacatatcctacacttgcatggcatgatacaagctctacaaggatggagaagataaaaatgagaaaaattttagtcatctagtttaatattataaaaataaggaaagtaagatcccaaatagcaattatagtaaacttaccaaataaaaaacaagtcataaaaatatatggaggtattttacacaataatcttgtcaaggagtcaaggtgacttatatgttgaatcataactaattctgattttagtataatgtatctaaaagttgaaactcatcatattgtttaaattgttcgtatgtgtaggaattattagactagcgactgctttctttgcagtgtccttaaaataacatgttcatttaagtctgtaaatgatagagtaagcatcttttaaaagtagaatggcatccacttggtaaccattcacttatggagaggtcacggagatctggagtcaggctgtgtgtttgaggaggacaaccaattgaagaatcacactttatcctccttgtgtttaggactgctttgctatttatcctcattgtgacaaatctcatctgaggcctttgaaaagcccagagaaaacaggtcatgtacgaaaattaaaaaccatccccatatccaataacaaagacatggctgcattttaaaactggagaaacaccacatactaaagaggcatggggtaaagaataagataaccaaatgttaccatatgaaaaaaaggaaaacaaacaggtgactgagacatctatgttctatttaaattacattcattctatatctgtagaatttctataacaattgtatggtgattttcaaaaacaaatctttttggagattatacaaagagagaacaacaagcaaatctgtactcctcaatgagttaaacatttgattagatttcaacaacaaaataaaatattcataatttggtttattttcttttgaatttattaataatcttaatatatatttatatatgtatggctttgagcaaagacaaaagaaatactctaactcttccctggtcatacagtgcaaagtataagttattgttctactttctcagcagtaaaagaccccaatacagctcttcccgtacagattaaaactccgtacttgagcttaactatgtacagagaaaaaaggtcatgttctcctagcactgtacctttacaaacacacacattcatacatatgtgtatttaatataccctgtatggttttgttactttaacatataaaccttagtgttctttgtccattcgagtacaaagtgaataaaaattttattggttgcactgaataaccatgcaattcaattttgcggatgttctccaatagtgctcaaaaaattgatatataaaaatattttactacgaaatgcattaatcctgccaaaggtagacctttaataatttaaaggactagtacatgatcttaacaagaagctaatttttaaatttaataaaataaaggagttttgtactgatatgtgataggtcttgcaactttcccatagattttacgtaggctgcaggatctctctcttacatcattcctaacaggataccattggtcactagcattacaggaatgacatcacgttacctagcattgctgattgtttcacacaaggtaggatccgttagcaattaagtgcaacgactcattttggtttcataaaaggcaatgtagatccactttaaacctcttgcttctacttttgttcttggtcctcaaggatacctggaggccctgtcccaatagaatgtatggtctttatgttcttaaatagatcatttgtgcctgtaatgtcaaagacctccatatcagctcactctcttgagttacgtacagaagtcaggcactagagagcctgctactgtgttctactcacccaccacttgtgtgaggtgcagcaaacacacatgaagcaagatcgctaagggacttccctagattaggctccatgatgctcacagaaagaattaaggaaacaagtgaacaaacagacaatgctttcagacagctcaattcccccctgcttcccctcacggagtccatataagtttcagcacatttgaaagaacaaacctcctgtctatctaaggactatgtaggttaccacatgccttaagatttactaactgcttagttacaatatacaaagggcaaaatgtgtatttccaaacagatgtggtgatatatagtatttatttcttcacattaacatcacaataaactaccaactaacatgaagacacataacacctttaactccaaaacaagctatggtttgcaaatgattgcttaaacaataagaacagcaacaatatcaaatgaaagtgaaaacctcacttctagatttaagtcagagatccaagtcagccttttaagaattttaagagaggcaattaatgaatagttatactcatctagaagtgagaaatactgtcagccttttcttacaatgattgatttgaatctacttttttttttaagttattttattttatttttttttgcccccgaaagcatgccaggaccaggttcaggtgcttgattatgtcaagaaggaataaaagtaatgatttttggtgtcatacaagcaatttgtaggttcaagcatacaatttttgcattaaagtatcgcaggttaaaaatgatattgtaggtctcaagccattgcattacatttgaacagctgtcacaattagagtgttttgtgaaatttaaaactctaacttttgaagtgaagcagtaaaactaaattcttaaacactgacttttacctttctacaacacagaatagttactttaattcgggctgggaaagttatttacagctaacattgactgcgtcttggtaaaagtccagtgacacatgaagacaaatatctcctcacttttctcacaaaatcaatgaacatgtttgaggttagaggaagccttaatggcaatgttagtctcctacggtggctgagcatggagcgtgttccttcacctaactcaaaatttaaagcaccaaaatacaattgagagctataaactgggatttgtttattgaatcccgcataattaacaacctagacgcagaggcacagctaatgaaagaaagctttgattggtgctatgctggatctaattggagttgccttttttaaaatcaagagttttgtttccattgactccaagaactcttcataaaagggagaaacacatatatcaaaggaatcaagtaaaaggttagaaatcaatgaccttacaacaatgtgttaaatcctttaatggttttaaagagaggaagacatgtaacactgaatgttatacaagtcttttgaacttctcttgggcatttagatatatatatatatatatatatttaattatatatgtatatatgtttttacatttgcatgtaggccacagcttctaaaatatttttttttcagagtaggctatagggatctatcgtgagatagaataaaataatatctgagaatattctgtttattagagtacttcttttctgctttgacaatcatcaagaatcataaattcgaagcaaaacggggtttttctgcatctgggtctgtatttaggactgagggagactctctctgcacagctgctggtggagggggtgctggaggcactcctcggttgggggggatggctcccgaggacatctgtcggaacaaggtgacacgttgtggcactgtgctcctgctccctgcctgaaggccagtgctgtggactgctgccacgggttgagggatagaggccagggattcgcccacagtgggatgaggtctggagatcaaagtggagacctcatggggcagagaaggctgcgaggcggaaaggggcctgacttctttggtcaggttggtgttatgaagggcttgtgtgctcttgtgcacttcatttttcggtgtggagctaccaggtgtctgtggctgctgctgctgctgctgctgctgctgctgctgctgctgctgctgctgctgctgctgctgttgttgctgttgctgctgctgctgctgctgctgttgctgctgctgctgctgagtctgagtctgagtctgctgtacctgggactgcggtagttgctgctgaggctgctgcatgagtgacagctgggacgcagtgggagaggcataatggaaagttcgtgtggccagggggctctgtataggaggactgcagactgctgtggtataggagcagggtgaaaggatggctgagggttggggcgtctgtgtgctgggactgggtgagtgcagattgctgtgagacaggctggttgcggtgtagactggcggagattgggtcctcatgcgggaggttggggtggtggttgaagatgtgcagttgagggctgtcatttgaggatagttgattggagggatagcttgtaccatctctcggtcatgcttcacgatctgcttcaggatctcgttctcctggttgttgaaaacaccagtgtttagatccttctggaacttctgcaggagaatagagtttttcttgcctatccgatcgagtcggtcaatagcaactgtctcaaaggctcttctcatcattggatattcctccaagacctcattgaaattgtccaccgaaagggagtaaagacgacagtaggtatcagctcggacactggcagtgcgccggcccttggtcagcaggcatatctctccgaagtaagagccatctgtcagcttcatttctttactggacttggtgataacgccagcaacaccgtgctggatgaaatacattttcttccccacagctccttctcgaatgatatagtctccgggctggaacacctcaaatctcagcttgctcagcatggccgtcacgaaattgggatcggcgttagcaaaaagaggcatagttgccaccagtttccggcagttgaagttgactatttcctctctcagaggatcattaagctcactgagaatattttcttcatcgaagatcttgccttggtatcggtgctcatagtaatcatgtatcttctggcgcatgtcagctggtaacttgtggaatgacatgtattgctctacttgcttatacttctcttgatactgcctccttgaagagtccaaagactggatcaaagctgtggcatggccaacaaacattgcgtagcaggtggcgcccacaatcatgctcagcatggtaatccagaggtcagacatgctgacaggggcttgggcgccataaccaatgcacagcatgtgactcatagctttgaagagtgcgtaggaatattgttttccccaggaatcattaaccatttcattcagagaaacccagcaatctggtgggaagtcctgcagcaggggaaccaggaactgaagacagccatcccagtggcacagaagcagcatcatgccaatgaggttgaagatcctcaccacagcactggcgaggtcataggtcatgtggaatatctcttcccactggtgtatgtatctgattaaccttgaaaggcgtaataaccgcaagagactgagaatttttgtaaacctcacgatacgaagtgctctggctgtcttgtaaacttctgagtccatccctttctctacaatgagaaagatataatccaccgggatcgatgagatgaagtccaccacaaaccagctttttaaataattcatcttgatcactttagggtccaggatgatttccgagctgtcttcattgacagtcccagtcctaaaattcatgattaagtccaacaggaaaacagtatcggatgccacgttgaaaataatccacggtgttgtcgtctgctctgtgaagaacgtgattccaactggtatgatgaccaaatttccaaccatcattataagcatgattaaatcccaataaaacctgaagtcactgtacggatggataatccagaagcctgcagttttaaccctttcctgctccttctccaccgccttctggctcccaaacatgcggagggagaatttgttgaccccaggctgcagcatggaggtgaactgcctctgcatgaaaccatactgccgccggggcccctcggcatcctcgaagctgcccgccggctcctctcctccgccgccgtccaccttgaagcacacggagttgccatgttccttcccggccgcgccgccccccggcggggtccccaggcgcttgtcggccgccaccggccccgtcgcgggcgccttggaggggaagacgctgttgccatcgtcgcggctgttggacgcggagttgggtttgccgccgccttccatgcccggaggacgcgaccggcgacggcgcgggctccagactcgccgggggctcgaagccaaggagcaggggccggagccggctgcccgtcgcggcggcagcggcggcggcggctactgcttcccgcccgcccgctgctccgctgcgcgcctggctcccgccgccgccgctgccctcagtggctgcgctgccggctctgccgcgctccgggctccgccgcgcctggtactgaggctgaggctgaggctgcgggcgcggggcgaggctcctccgctcggcacccgcgcgccagcgccgcccctcggctgccccctgctggccgcagaccgcctctacccgcgcgcgccccgccgctcgcctgtgccacttctgcccagcgtgacatt

SEQ ID NO: 55 - RNA, 3064 nt, Rattus norvegicus
  source 1..3064: mol_type = mRNA
ccggcccctgccccttggcctcaagcccccggcgagtctggagccctcgccgtcgccggtcgcgtccttcgggcatggaaggcggcggcaagcccaactccgcttccaacagccgcgacgatggcaacagcgtttacccctccaaggcgcccgcgacggggccggcggcggccgacaagcgcctggggaccccgccggggggcggcgcggccgggaaggaacacggcaactccgtgtgcttcaaggtggacggcggcggaggagaggagccggcgggcagcttcgaggatgccgaggggccccggcgacagtacggtttcatgcagaggcagttcacctccatgctgcagcctggggtcaacaaattctccctccgcatgttcgggagccagaaggcggtggagaaggagcaggaaagggttaaaactgcaggcttctggattatccatccgtacagtgacttcaggttttattgggatttaataatgcttataatgatggttggaaatttggtcatcataccagttggaatcacattcttcacagagcaaacaacaacaccgtggattattttcaatgtggcatcagatacagttttcctgttggacctaatcatgaattttaggactgggactgtcaacgaagacagctctgaaatcatcctggaccctaaagtaatcaagatgaattatttaaaaagctggttcgtggtggacttcatctcctcgatcccggtggattatatctttcttattgtagagaaaggaatggattcggaagtttacaagaccgccagagcacttcggatcgtgaggtttacaaaaattctcagtctcttgcgtttattacgcctttcaaggttaattagatacatacaccagtgggaagagatattccacatgacatatgatctcgccagtgcagtggtgagaatcttcaacctcattggcatgatgctgctcctgtgtcactgggatggctgtcttcagtttctggtccccctgctgcaggacttcccaccggattgctgggtttctctaaatgaaatggttaatgattcatgggggaaacagtattcctacgcactcttcaaagctatgagtcacatgctgtgcattggttatggcgcccaggcccccgtcagcatgtctgacctctggattaccatgctgagcatgattgttggggccacctgctatgccatgtttgtcggccatgccacagctttgatccagtctctggattcttcaaggaggcagtatcaagagaagtacaagcaagtagagcaatacatgtcattccacaagttaccagctgacatgcgccagaagatacatgattactatgagcaccgataccaaggcaagatcttcgatgaggaaaatattctcagtgaacttaatgatcctctgagagaggaaatagtcaacttcaactgccggaaactggtggccaccatgcctctctttgctaacgcggatcccaatttcgtgacggccatgctgagcaagctgagatttgaggtgttccagcccggagactatatcattcgagaaggagctgtggggaagaaaatgtatttcatccagcatggtgtggctggtgtcatcaccaagtccagtaaagaaatgaagttgacagacggctcttactttggagaaatatgcctgctgaccaagggccggcgcactgccagtgttcgagctgatacatactgtcgcctttactccctttcggtggacaatttcaacgaggtcttggaggaatatccaatgatgagaagagcctttgagacagttgctattgaccgactagatcggataggcaagaaaaactctattctcctgcagaagttccagaaggatctgaacactggtgttttcaacaaccaggagaatgagatcctgaagcagattgtgaagcatgacagagagatggtacaagcgatccctccaatcaactatcctcaaatgacagccctgaattgcacatcttcaaccaccaccccaacgtcgcgcatgaggacccaatctccaccagtctacacagcgaccagcctctctcacagcaacctgcactcacccagccccagcacacagacgcctcaaccctcagccatcctttcaccctgctcctacaccacagcagtctgcagtcctcctatacagagccccctggccacgcgaactttccattatgcctctcccactgcatcccaattgtcactcatgcagcagcctcagccgcagctacagcaatcccaggtacagcagactcagccgcagccgcagccgcagccgcagcagccgcaacagcaacaacagcagcaacagcagcagcagcagcagcagcaacaacaacagcagcagcaacagccacagacacctggtagttccacaccgaaaaatgaagtgcacaagagcactcaagctcttcataacaccaacctgaccagagaagtcaggcccctctctgcctcgcagccttcgctgccccatgaggtctccactatgatctccagaccgcatcccactgtgggcgagtccctggcctccatccctcaacccatggcaacagtccacagcactggccttcaggcagggagcaggagcaccgtgccacagcgtgtcaccttgttcagacagatgtcctcgggagccattccccccaaccgaggagtgcctccagcacccccaccaccagcagctgtgcagagagagtctccctcagtcttaaataaagacccagatgcagaaaaaccacgttttgcttcgaatttatgattcttgctgattgtcaaagcagaaaagaaatactctaataaacagaatattctcagatattattttattctatctcatgatagagccctatagcctactctaaaaagatattttagaagctctggcgtacatgcaaatgtaaaaacatatatacatatattattaaatatatatatatatctaaatgcccaagagaagttcaaaagacttgtataactttcagtgttatgtcttcctttctttaaaaccattaaaggatttaacacattgttgtaagatca

SEQ ID NO: 56 - RNA, 3064 nt, Rattus norvegicus
  source 1..3064: mol_type = mRNA
tgatcttacaacaatgtgttaaatcctttaatggttttaaagaaaggaagacataacactgaaagttatacaagtcttttgaacttctcttgggcatttagatatatatatatatttaataatatatgtatatatgtttttacatttgcatgtacgccagagcttctaaaatatctttttagagtaggctatagggctctatcatgagatagaataaaataatatctgagaatattctgtttattagagtatttcttttctgctttgacaatcagcaagaatcataaattcgaagcaaaacgtggtttttctgcatctgggtctttatttaagactgagggagactctctctgcacagctgctggtggtgggggtgctggaggcactcctcggttggggggaatggctcccgaggacatctgtctgaacaaggtgacacgctgtggcacggtgctcctgctccctgcctgaaggccagtgctgtggactgttgccatgggttgagggatggaggccagggactcgcccacagtgggatgcggtctggagatcatagtggagacctcatggggcagcgaaggctgcgaggcagagaggggcctgacttctctggtcaggttggtgttatgaagagcttgagtgctcttgtgcacttcatttttcggtgtggaactaccaggtgtctgtggctgttgctgctgctgttgttgttgctgctgctgctgctgctgctgttgctgctgttgttgctgttgcggctgctgcggctgcggctgcggctgcggctgagtctgctgtacctgggattgctgtagctgcggctgaggctgctgcatgagtgacaattgggatgcagtgggagaggcataatggaaagttcgcgtggccagggggctctgtataggaggactgcagactgctgtggtgtaggagcagggtgaaaggatggctgagggttgaggcgtctgtgtgctggggctgggtgagtgcaggttgctgtgagagaggctggtcgctgtgtagactggtggagattgggtcctcatgcgcgacgttggggtggtggttgaagatgtgcaattcagggctgtcatttgaggatagttgattggagggatcgcttgtaccatctctctgtcatgcttcacaatctgcttcaggatctcattctcctggttgttgaaaacaccagtgttcagatccttctggaacttctgcaggagaatagagtttttcttgcctatccgatctagtcggtcaatagcaactgtctcaaaggctcttctcatcattggatattcctccaagacctcgttgaaattgtccaccgaaagggagtaaaggcgacagtatgtatcagctcgaacactggcagtgcgccggcccttggtcagcaggcatatttctccaaagtaagagccgtctgtcaacttcatttctttactggacttggtgatgacaccagccacaccatgctggatgaaatacattttcttccccacagctccttctcgaatgatatagtctccgggctggaacacctcaaatctcagcttgctcagcatggccgtcacgaaattgggatccgcgttagcaaagagaggcatggtggccaccagtttccggcagttgaagttgactatttcctctctcagaggatcattaagttcactgagaatattttcctcatcgaagatcttgccttggtatcggtgctcatagtaatcatgtatcttctggcgcatgtcagctggtaacttgtggaatgacatgtattgctctacttgcttgtacttctcttgatactgcctccttgaagaatccagagactggatcaaagctgtggcatggccgacaaacatggcatagcaggtggccccaacaatcatgctcagcatggtaatccagaggtcagacatgctgacgggggcctgggcgccataaccaatgcacagcatgtgactcatagctttgaagagtgcgtaggaatactgtttcccccatgaatcattaaccatttcatttagagaaacccagcaatccggtgggaagtcctgcagcagggggaccagaaactgaagacagccatcccagtgacacaggagcagcatcatgccaatgaggttgaagattctcaccactgcactggcgagatcatatgtcatgtggaatatctcttcccactggtgtatgtatctaattaaccttgaaaggcgtaataaacgcaagagactgagaatttttgtaaacctcacgatccgaagtgctctggcggtcttgtaaacttccgaatccattcctttctctacaataagaaagatataatccaccgggatcgaggagatgaagtccaccacgaaccagctttttaaataattcatcttgattactttagggtccaggatgatttcagagctgtcttcgttgacagtcccagtcctaaaattcatgattaggtccaacaggaaaactgtatctgatgccacattgaaaataatccacggtgttgttgtttgctctgtgaagaatgtgattccaactggtatgatgaccaaatttccaaccatcattataagcattattaaatcccaataaaacctgaagtcactgtacggatggataatccagaagcctgcagttttaaccctttcctgctccttctccaccgccttctggctcccgaacatgcggagggagaatttgttgaccccaggctgcagcatggaggtgaactgcctctgcatgaaaccgtactgtcgccggggcccctcggcatcctcgaagctgcccgccggctcctctcctccgccgccgtccaccttgaagcacacggagttgccgtgttccttcccggccgcgccgccccccggcggggtccccaggcgcttgtcggccgccgccggccccgtcgcgggcgccttggaggggtaaacgctgttgccatcgtcgcggctgttggaagcggagttgggcttgccgccgccttccatgcccgaaggacgcgaccggcgacggcgagggctccagactcgccgggggcttgaggccaaggggcaggggccgg

SEQ ID NO: 57 - RNA, 5518 nt, Macaca mulatta
  source 1..5518: mol_type = mRNA
ccggccgcgtcctccgggcatggaaggaggtggcaagcccaactcttcgtctaacagccgggacgatggcaacagcgtcttccccgccaaggcgtccgcgacgggcgcggggccggccgcggccgagaaacgcttgggcaccccgccggggggcggcggggccggcgcgaaggagcacggcaactccgtgtgcttcaaggtggacggcggcggcggaggaggcggcgaggagccggctgggggctttgaggacgccgaggggccccggcggcagtacggcttcatgcagaggcagttcacctccatgctgcaacccggagtcaacaaattctccctccgcatgtttgggagccagaaggcggtggaaaaggagcaggaaagggttaaaactgcaggcttctggattatccacccttacagtgatttcaggttttattgggatttaataatgcttataatgatggttggaaatctagtcatcataccagttggaatcacattctttacagagcaaacaacaacaccatggattattttcaatgtggcatcagatacagttttcctactggacctgatcatgaattttaggactggaactgtcaacgaagacagttctgaaatcatcctggaccccaaagtgatcaagatgaattatttaaaaagctggtttgtggttgacttcatctcatccatcccagtggattatatctttcttattgtagaaaaaggaatggattcagaagtttacaagacagccagggcacttcgcattgtgaggtttacaaaaattctcagtctcttgcgtttattacgactttcaaggttaattagatacatacatcagtgggaagagatattccacatgacgtatgatcttgccagtgcagtggtgagaatttttaatctcatcggcatgatgctgctcctgtgtcactgggatggttgtcttcagttcttagtaccactactgcaggacttcccaccagattgctgggtgtctttaaatgaaatggttaatgattcttggggaaagcagtattcatacgcactcttcaaagctatgagtcacatgctgtgcattgggtatggagcccaagccccagtcagcatgtctgacctctggattaccatgctgagcatgatcgtcggggccacctgctatgccatgtttgtcggccatgccactgctttaatccagtctctggattcttctaggcggcagtatcaagagaagtataagcaagtggaacaatacatgtcattccataagttaccagctgatatgcgtcagaagatacatgattactatgaacacagataccaaggcaaaatctttgatgaggaaaatattctcaatgaactcaatgatcctctgagagaggagatagtcaacttcaactgtcggaaactggtggctacaatgcctttatttgctaatgcggatcctaattttgtgactgccatgctgagcaagttgagatttgaggtgtttcaacctggagattatatcatacgagaaggagccgtgggtaaaaaaatgtatttcattcaacatggtgttgctggtgtcattacaaaatccagtaaagaaatgaagctgacagatggctcttactttggagagatttgcctgctgaccaaaggacgtcgtactgccagtgttcgagctgatacatattgtcgtctttactcactttctgtggacaatttcaacgaagtcctggaggaatatccaatgatgaggagagcctttgagacagttgccattgaccgactagatcgaataggaaagaaaaattcaattcttctgcaaaagttccagaaggatctgaacactggtgttttcaacaatcaggagaacgaaatcctcaagcagattgtgaaacatgacagggagatggtgcaggcaatcgctcccatcaattatcctcaaatgacaaccctgaattccacatcgtcaactacgaccccgacctcccgcatgaggacacaatctccaccagtgtacacagcgaccagcctatctcacagcaacctgcattcccccagtcccagcacacagaccccccagccatcagccatcctttcaccctgctcctacaccaccgccgtctgcagccctcctgtacagagccctctggccgctcgaactttccactacgcctcccccaccgcctcccagctgtcactcatgcaacagcagcctcagcagcaggtacagcagtcccagccgccgcagactcagccacagcagccgtctccgcagccacagacacctggcagctccacgccgaaaaacgaagtgcacaagagcacgcaggcgcttcacaacaccaacctgacccgggaagtcaggcccctctccgcctcgcagccctcgctgccccatgaggtgtccactctgatttccagacctcatcccactgtgggcgagtccctggcctccatccctcaacccgtgacggcggtccccggaacgggccttcaggcagggggcaggagcactgtcccgcagcgcgtcaccctcttccgacagatgtcgtcgggagccatcccccccaaccgaggagtccctccagcaccccctccaccagcagctgctcttccgagagagtcttcctcagtcttaaacacagacccagacgcagaaaagccacgatttgcttcaaatttatgatccctgctgattgtcaaagcagaaagaaatactctcataaactgagactatactcagatcttattttattctatctcctgatagatccctctagcctactatgaagagatattttagacagctctggcctacacgtgaaatgtaaaatatatatacatatactataaaatatatatctaaattctcaagagagggtcaaaagacctgtttagcattcagtgttatatgtcttcctttctttaaatcattagaggatttaaaatgttgttgtaagattatttatttctaacctacttttacttaagtcctttgatatgtatatttctctgttttatgaagagttcttggattcaatggaaacaaaactgattttaaaaaaggcaactcaaatgagctagcaaatagcaccaatcaaaactttctttcattagctgtgactgtgcatctaaattgttaatcattaatcatgaagaattaaataacaaatcccattttatagatctaaattgtatttcggtgctttcaatttcgaattaggttaaagactgcactacttgcttggccactgtaggagactagcattgccactgttaagaatatcactaacctcctacttcggaggctgaggcaggagaatggcttgaacccaggaggcggagcttgcagtgagcagagatagcgccactgcactcgagcctgggcgacagagcgagactccgtctcaaaaaaaaaaaaaaaaaaaaaagaaagaaagaaaaaagaaaagagtatcactaacctcaaacatgttcattgatctttcagaaagctgagggaaaattaatatttgtcttcatgtgttatcggacttttaccaagactcgatcaatgttagttgtaaataactttttcaacccaaataaaaatagctattctgtgttgtatgaagctaaaagtcattgtttaagagtttagttttatcgcttcacttcaaaacttagagttttaaatttcacaaaatctgattgtgagaattattcaattgtaatgcaatggcttgaaacctacaatattattttaacctgcaatgttttatgcaaaattgtatgctcgaatctacaacttgcttgtattacaccaaaaatcattatttttctttcttcttgccataatcaagcatctgaaaatagtccctgcatgcttctggggaaaaaaaaaaaaaataggttcaaatcagccattgtagggaaaggcttacagtatttctcgtttctagaaaagcataacaattcattaattgcctctcttataattcctataaggctgacttggatctctgacttaagtctagaagtgaggttttcacttttatttaatattattgctattattatttaaataattatttgtaaaccacagcttgatttggagttaagtattgtctatgtcttcactgtagctggtaatttactatggtgttaatttaaagaaataaattcaatacagcatcacgtctgtttgggaacacacattttgctctatgtatattgtaactaaatggttagtaaactttaaggcatgtggtgactaatgtagcccttagataggaggtttgtccttttttaatgtgttgaaaatagtacagacatggtggcagaaagcaggggtaaagttgaatgtctgtgagcattgtttgtctattttcttaactctttccatgatctgtgagcacctgcttcttctcaaagaactcccttagtaatcatttgtgcctaatgcatcccacacatgtggcgtatgactggaacacaattgaaagatacctaataactggcttctgtaaataacccaagttaacagcatgacgtaagtgtaggtcttcagtatctctggcattggcaatacatttaagaacatacagagattacacattatatggggcagggcctgcagatagacttgaggacagaaaacaaaaacaaaagcaaaaactctaaagtgaatccttgctgcctgttatgccttttgcggatataatacctataatacccaaatgagttgttatgtttaatttcaaacaaataccaatttgtgtggaagtaattaacaatgctagttaatgtaatgtaatcatcagtatgctggtgacatatgatggatgtcaggaatactgttgtaagaaagggattgttcagtctacctagaacctatgggaaagctgcaagaccatttacatatcagtataaaactcctttattttattaaaatatgagagttaacttcaatttattaagagtatgtattggtcctttaaattattaaaggtttacatttgataggattaatggatttggtagtgaaatatttttatatatataaatttttggttttttattttgagcactattgggaaaaataagcaaaattgaaatgcatggtctttcagtgcaaccatacaatttttattcactttgtaatagaatggacaaaaaaactaaggtttatatgttaaactaataaaatggtacagggtaaattatatacatatatgtatgaatgtatatatacttagattaagaaaaaaaaatgactcacattcctgtaatataaaggtccattgctagttgaaaagtgacctcttttctctgtacatagtgaagcctgtacgtatggagttttaatctgtacagaaagaaatgtattattgattggtctttctcctgctgggaagataatagaatagcttattcttacaacaattgtatgatcagggatgagttagagtatttcttttgtctttgctcaaagccatacatatataaatatatataaagattattaataaattcaacaaaaaataaa

SEQ ID NO: 58 - RNA, 5518 nt, Macaca mulatta
  source 1..5518: mol_type = mRNA
tttattttttgttgaatttattaataatctttatatatatttatatatgtatggctttgagcaaagacaaaagaaatactctaactcatccctgatcatacaattgttgtaagaataagctattctattatcttcccagcaggagaaagaccaatcaataatacatttctttctgtacagattaaaactccatacgtacaggcttcactatgtacagagaaaagaggtcacttttcaactagcaatggacctttatattacaggaatgtgagtcatttttttttcttaatctaagtatatatacattcatacatatatgtatataatttaccctgtaccattttattagtttaacatataaaccttagtttttttgtccattctattacaaagtgaataaaaattgtatggttgcactgaaagaccatgcatttcaattttgcttatttttcccaatagtgctcaaaataaaaaaccaaaaatttatatatataaaaatatttcactaccaaatccattaatcctatcaaatgtaaacctttaataatttaaaggaccaatacatactcttaataaattgaagttaactctcatattttaataaaataaaggagttttatactgatatgtaaatggtcttgcagctttcccataggttctaggtagactgaacaatccctttcttacaacagtattcctgacatccatcatatgtcaccagcatactgatgattacattacattaactagcattgttaattacttccacacaaattggtatttgtttgaaattaaacataacaactcatttgggtattataggtattatatccgcaaaaggcataacaggcagcaaggattcactttagagtttttgcttttgtttttgttttctgtcctcaagtctatctgcaggccctgccccatataatgtgtaatctctgtatgttcttaaatgtattgccaatgccagagatactgaagacctacacttacgtcatgctgttaacttgggttatttacagaagccagttattaggtatctttcaattgtgttccagtcatacgccacatgtgtgggatgcattaggcacaaatgattactaagggagttctttgagaagaagcaggtgctcacagatcatggaaagagttaagaaaatagacaaacaatgctcacagacattcaactttacccctgctttctgccaccatgtctgtactattttcaacacattaaaaaaggacaaacctcctatctaagggctacattagtcaccacatgccttaaagtttactaaccatttagttacaatatacatagagcaaaatgtgtgttcccaaacagacgtgatgctgtattgaatttatttctttaaattaacaccatagtaaattaccagctacagtgaagacatagacaatacttaactccaaatcaagctgtggtttacaaataattatttaaataataatagcaataatattaaataaaagtgaaaacctcacttctagacttaagtcagagatccaagtcagccttataggaattataagagaggcaattaatgaattgttatgcttttctagaaacgagaaatactgtaagcctttccctacaatggctgatttgaacctattttttttttttttccccagaagcatgcagggactattttcagatgcttgattatggcaagaagaaagaaaaataatgatttttggtgtaatacaagcaagttgtagattcgagcatacaattttgcataaaacattgcaggttaaaataatattgtaggtttcaagccattgcattacaattgaataattctcacaatcagattttgtgaaatttaaaactctaagttttgaagtgaagcgataaaactaaactcttaaacaatgacttttagcttcatacaacacagaatagctatttttatttgggttgaaaaagttatttacaactaacattgatcgagtcttggtaaaagtccgataacacatgaagacaaatattaattttccctcagctttctgaaagatcaatgaacatgtttgaggttagtgatactcttttcttttttctttctttcttttttttttttttttttttttgagacggagtctcgctctgtcgcccaggctcgagtgcagtggcgctatctctgctcactgcaagctccgcctcctgggttcaagccattctcctgcctcagcctccgaagtaggaggttagtgatattcttaacagtggcaatgctagtctcctacagtggccaagcaagtagtgcagtctttaacctaattcgaaattgaaagcaccgaaatacaatttagatctataaaatgggatttgttatttaattcttcatgattaatgattaacaatttagatgcacagtcacagctaatgaaagaaagttttgattggtgctatttgctagctcatttgagttgccttttttaaaatcagttttgtttccattgaatccaagaactcttcataaaacagagaaatatacatatcaaaggacttaagtaaaagtaggttagaaataaataatcttacaacaacattttaaatcctctaatgatttaaagaaaggaagacatataacactgaatgctaaacaggtcttttgaccctctcttgagaatttagatatatattttatagtatatgtatatatattttacatttcacgtgtaggccagagctgtctaaaatatctcttcatagtaggctagagggatctatcaggagatagaataaaataagatctgagtatagtctcagtttatgagagtatttctttctgctttgacaatcagcagggatcataaatttgaagcaaatcgtggcttttctgcgtctgggtctgtgtttaagactgaggaagactctctcggaagagcagctgctggtggagggggtgctggagggactcctcggttgggggggatggctcccgacgacatctgtcggaagagggtgacgcgctgcgggacagtgctcctgccccctgcctgaaggcccgttccggggaccgccgtcacgggttgagggatggaggccagggactcgcccacagtgggatgaggtctggaaatcagagtggacacctcatggggcagcgagggctgcgaggcggagaggggcctgacttcccgggtcaggttggtgttgtgaagcgcctgcgtgctcttgtgcacttcgtttttcggcgtggagctgccaggtgtctgtggctgcggagacggctgctgtggctgagtctgcggcggctgggactgctgtacctgctgctgaggctgctgttgcatgagtgacagctgggaggcggtgggggaggcgtagtggaaagttcgagcggccagagggctctgtacaggagggctgcagacggcggtggtgtaggagcagggtgaaaggatggctgatggctggggggtctgtgtgctgggactgggggaatgcaggttgctgtgagataggctggtcgctgtgtacactggtggagattgtgtcctcatgcgggaggtcggggtcgtagttgacgatgtggaattcagggttgtcatttgaggataattgatgggagcgattgcctgcaccatctccctgtcatgtttcacaatctgcttgaggatttcgttctcctgattgttgaaaacaccagtgttcagatccttctggaacttttgcagaagaattgaatttttctttcctattcgatctagtcggtcaatggcaactgtctcaaaggctctcctcatcattggatattcctccaggacttcgttgaaattgtccacagaaagtgagtaaagacgacaatatgtatcagctcgaacactggcagtacgacgtcctttggtcagcaggcaaatctctccaaagtaagagccatctgtcagcttcatttctttactggattttgtaatgacaccagcaacaccatgttgaatgaaatacatttttttacccacggctccttctcgtatgatataatctccaggttgaaacacctcaaatctcaacttgctcagcatggcagtcacaaaattaggatccgcattagcaaataaaggcattgtagccaccagtttccgacagttgaagttgactatctcctctctcagaggatcattgagttcattgagaatattttcctcatcaaagattttgccttggtatctgtgttcatagtaatcatgtatcttctgacgcatatcagctggtaacttatggaatgacatgtattgttccacttgcttatacttctcttgatactgccgcctagaagaatccagagactggattaaagcagtggcatggccgacaaacatggcatagcaggtggccccgacgatcatgctcagcatggtaatccagaggtcagacatgctgactggggcttgggctccatacccaatgcacagcatgtgactcatagctttgaagagtgcgtatgaatactgctttccccaagaatcattaaccatttcatttaaagacacccagcaatctggtgggaagtcctgcagtagtggtactaagaactgaagacaaccatcccagtgacacaggagcagcatcatgccgatgagattaaaaattctcaccactgcactggcaagatcatacgtcatgtggaatatctcttcccactgatgtatgtatctaattaaccttgaaagtcgtaataaacgcaagagactgagaatttttgtaaacctcacaatgcgaagtgccctggctgtcttgtaaacttctgaatccattcctttttctacaataagaaagatataatccactgggatggatgagatgaagtcaaccacaaaccagctttttaaataattcatcttgatcactttggggtccaggatgatttcagaactgtcttcgttgacagttccagtcctaaaattcatgatcaggtccagtaggaaaactgtatctgatgccacattgaaaataatccatggtgttgttgtttgctctgtaaagaatgtgattccaactggtatgatgactagatttccaaccatcattataagcattattaaatcccaataaaacctgaaatcactgtaagggtggataatccagaagcctgcagttttaaccctttcctgctccttttccaccgccttctggctcccaaacatgcggagggagaatttgttgactccgggttgcagcatggaggtgaactgcctctgcatgaagccgtactgccgccggggcccctcggcgtcctcaaagcccccagccggctcctcgccgcctcctccgccgccgccgtccaccttgaagcacacggagttgccgtgctccttcgcgccggccccgccgccccccggcggggtgcccaagcgtttctcggccgcggccggccccgcgcccgtcgcggacgccttggcggggaagacgctgttgccatcgtcccggctgttagacgaagagttgggcttgccacctccttccatgcccggaggacgcggccgg

SEQ ID NO: 59 - RNA, 8090 nt, Macaca fascicularis
  source 1..8090: mol_type = mRNA
taccctctcggctacgtgtccccggcgccgggctgccggcgagtctggagcccgcgccgtcgccggccgcgtcctccgggcatggaaggaggtggcaagcccaactcttcgtctaacagccgggacgatggcaacagcgtcttccccgccaaggcgtccgcgacgggcgcggggccggccgcggccgagaaacgcttgggcaccccgccggggggcggcggggccggcgcgaaggagcacggcaactccgtgtgcttcaaggtggacggcggcggcggaggcggcggcgaggagccggctgggggctttgaggacgccgaggggccccggcggcagtacggcttcatgcagaggcagttcacctccatgctgcaacccggagtcaacaaattctccctccgcatgtttgggagccagaaggcggtggaaaaggagcaggaaagggttaaaactgcaggcttctggattatccacccttacagtgatttcaggttttattgggatttaataatgcttataatgatggttggaaatctagtcatcataccagttggaatcacattctttacagagcaaacaacaacaccatggattattttcaatgtggcatcagatacagttttcctactggacctgatcatgaattttaggactggaactgtcaacgaagacagttctgaaatcatcctggaccccaaagtgatcaagatgaattatttaaaaagctggtttgtggttgacttcatctcatccatcccagtggattatatctttcttattgtagaaaaaggaatggattcagaagtttacaagacagccagggcacttcgcattgtgaggtttacaaaaattctcagtctcttgcgtttattacgactttcaaggttaattagatacatacatcagtgggaagagatattccacatgacgtatgatcttgccagtgcagtggtgagaatttttaatctcatcggcatgatgctgctcctgtgtcactgggatggttgtcttcagttcttagtaccactactgcaggacttcccaccagattgctgggtgtctttaaatgaaatggttaatgattcttggggaaagcagtattcatacgcactcttcaaagctatgagtcacatgctgtgcattgggtatggagcccaagccccagtcagcatgtctgacctctggattaccatgctgagcatgatcgtcggggccacctgctatgccatgtttgtcggccatgccactgctttaatccagtctctggattcttcgaggcggcagtatcaagagaagtataagcaagtggaacaatacatgtcattccataagttaccagctgatatgcgtcagaagatacatgattactatgaacacagataccaaggcaaaatctttgatgaggaaaatattctcaatgaactcaatgatcctctgagagaggagatagtcaacttcaactgtcggaaactggtggctacaatgcctttatttgctaatgcggatcctaattttgtgactgccatgctgagcaagttgagatttgaggtgtttcaacctggagattatatcatacgagaaggagccgtgggtaaaaaaatgtatttcattcaacatggtgttgctggtgtcattacaaaatccagtaaagaaatgaagctgacagatggctcttactttggagagatttgcctgctgaccaaaggacgtcgtactgccagtgttcgagctgatacatattgtcgtctttactcactttctgtggacaatttcaacgaggtcctggaggaatatccaatgatgaggagagcctttgagacagttgccattgaccgactagatcgaataggaaagaaaaattcaattcttctgcaaaagttccagaaggatctgaacactggtgttttcaacaatcaggagaacgaaatcctcaagcagattgtgaaacatgacagggagatggtgcaggcaatcgctcccatcaattatcctcaaatgacaaccctgaattccacatcgtcaactacgaccccgacctcccgcatgaggacacaatctccaccagtgtacacagcgaccagcctgtctcacagcaacctgcattcccccagtcccagcacacagaccccccagccatcagccatcctttcaccctgctcctacaccaccgccgtctgcagccctcctgtacagagccctctggccgctcgaactttccactatgcctcccccaccgcctctcagctgtcactcatgcaacagcagcctcagcagcaggtacagcagtcccagccgccgcagactcagccacagcagccgtctccgcagccacagacacctggcagctccacgccgaaaaacgaagtgcacaagagcacgcaggcgcttcacaacaccaacctgacccgggaagtcaggcccctctccgcctcgcagccctcgctgccccatgaggtgtccactctgatttccagacctcatcccactgtgggcgagtccctggcctccatccctcaacccgtgacggcggtccccggaacgggccttcaggcagggggcaggagcactgtcccgcagcgcgtcaccctcttccgacagatgtcgtcgggagccatcccccccaaccgaggagtccctccagcaccccctccaccagcagctgctcttccgagagagtcttcctcagtcttaaacacagacccagacgcagaaaagccacgatttgcttcaaatttatgatccctgctgattgtcaaagcagaaagaaatactctcataaactgagactatactcagatcttattttattctatctcctgatagatccctctagcctactatgaagagatattttagacagctctggcctacacgtgaaatgtaaaatatatatacatatactataaaatatatatctaaattctcaagagagggtcaaaagacctgtttagcattcagtgttatatgtcttcctttctttaaatcattagaggatttaaaatgttgttgtaagattatttatttctaacctacttttacttaagtcctttgatatgtatatttctctgttttatgaagagttcttggattcaatggaaacaaaactgattttaaaaaaggcaactcaaatgagctagcaaatagcaccaatcaaaactttctttcattagctgtgactgtgcatctaaattgttaatcattaatcatgaagaattaaataacaaatcccattttatagatctaaattgtatttcggtgctttcaatttcgaattaggttaaagactgcactacttgcttggccactgtaggagactagcattgccactgttaagaatatcactaacctcctacttcggaggctgaggcaggagaatggcttgaacccaggaggcggagcttgcagtgagcagagatagtgcactgcactcgagcctgggcgacagagcgagactccgtctcaaaaaaaaaaaaaaaaagaaagaaagaaagaaaaaagaaaagagtatcactaacctcaaacatgttcattgatctttcagaaagctgagggaaaattaatatttgtcttcatgtgttatcggacttttaccaagactcgatcaatgttagttgtaaataactttttcaacccaaataaaaatagctattctgtgttgtatgaagctaaaagtcattgtttaagagtttagttttatcgcttcacttcaaaacttagagttttaaatttcacaaaatctgattgtgagaattattcaattgtaatgcaatggcttgaaacctacaatattattttaacctgcaatgttttatgcaaaattgtatgctcgaatctacaacttgcttgtattacaccaaaaatcattatttttctttcttcttgccataatcaagcatctgaaaatagtccctgcatgctcctggggaaaaaaaaaaaaaaggttcaaatcagccattgtagggaaaggcttacagtatttctcgtttctagaaaagcataacaattcattaattgcctctcttataattcctataaggctgacttggatctctgacttaagtctagaagtgaggttttcacttttatttaatattattgctattattatttaaataattatttgtaaaccacagcttgatttggagttaagtattgtctatgtcttcactgtagctggtaatttactatggtgttaatttaaagaaataaattcaatacagcatcacgtctgtttgggaacacacattttgctctatgtatattgtaactaaatggttagtaaactttaaggcatgtggtgactaatgtagcccttagataggaggtttgtcattttttaatgtgttgaaaatagtacagacatggtggcagaaagcaggggtaaagttgaatgtctgtgagcattgtttgtctattttcttaactctttccatgatctgtgagcacctgcttcttctcaaagaactcccttagtaatcatttgtgcctaatgcatcccacacatgtggcgtatgactggaacacaattgaaagatacctaataactggcttctgtaaataacccaagttaacagcatgacgtaagtgtaggtcttcagtatctctggcattggcaatacatttaagaacatacagagattacacattatacggggcagggcctgcagatagacttgaggacagaaaacaaaaaaaaagcaaaaactctaaagtgaatccttgctgcctgttatgccttttgcggatataatacctataatacccaaatgagttgttatgtttaatttcaaacaaataccaatttgtgtggaagtaattaacaatgctagttaatgtaatgtaatcatcagtatgctggtgacatatgatggatgtcaggaatactgttgtaagaaagggattgttcagtctacctagaacctatgggaaagctgcaagaccatttacatatcagtataaaactcctttattttattaaaatatgagagttaacttcaatttattaagagtatgtattggtcctttaaattattaaaggtttacatttgataggattaatggatttggtagtgaaatatttttatatatataaatttttggttttttattttgagcactattgggaaaaataagcaaaattgaaatgcatggtctttcagtgcaaccatacaatttttattcactttgtaatagaatggacaaaaaaactaaggtttatatgttaaactaataaaatggtacagggtaaattatatacatatatgtatgaatgtatatatacttagattaagaaaaaaaaaatgactcacattcctgtaatataaaggtccattgctagttgaaaagtgacctcttttctctgtacatagtgaagcctgtacgtatggagttttaatctgtacagaaagaaatgtattattgattggtctttctcctgctgggaagataatagaatagcttattcttacaacaattgtatgatcagggatgagttagagtatttcttttgtctttgctcaaagccatacatatataaatatatataaagattattaataaattcaacaaaaactacaatcatgaatattttattttatcaatatatgctaatcaaatgttttattttattaacgagtacagctttgcctctatttttacatcacaaaatttccaagagcttatacttgataatcacataaaatcaattatattctataattctggaataagaggactttaaatggaacatggatttttcaaccacttctctgtttcaccctttacatatagtaaaatatgagcttattttctttttcactctgtgcctttttagaatgtggttgttctccaacttcaaaacacagccattttatgtaattattggatatacggatgagaaataattttcctgtaatagtaaataattgtcctgtaatatatttatacaaacctattttgttataatagttctataacataccaattttgttataatagttttatagcatacctattttgttataatagggccttgtgctctattataacaaaacaggtttatataaatatattcatatttatagccttaaacaaaataggtttgtatagtacgcccaaagccctattataacaaaataggtttgtataaatatattcatatttatagccttgggccctgcaaaggtatttggatagtgatagaacctccccatacaactgtgttttaaatgatacctaaaagcctgagatacagtttatcataatgagaataagtagtaaagcattcctgaaaacaaggatgataaatagtagcgatggcaatatattctattcaccaaaaaaaatagcttgtctccaagtctggttgacctcttcataagtgaatgattccctgatgaatgctgttccactttaaagagatggttattttgcgatttataaacttaaatgagtatactattttcaggatgctacaaagtacataggcaagttattaccgtcattcctataggacatggaatgatttaaacaatatggcatgtttacaattttaggagatttatttcaaatcctgaattatgtgtacttcaaattatgagcaatctctattatctttcaagactatttaaaaaatctccatacctcctctttcagcttaggtttttatatttgttgattttactatgtcactttgcttctatggccctcatttgcaccatttataatgttaagctgtttgaatgagatatctctccattatatctttatctttttagaacatgtgccataaaacccatgtggttattttgttcatatgtactacaactagcaaacttttattatatgttcacctaccttaaaaattacttatactgtaccatgggaaagaaacatggtccttatagaattgaatgctgagctattttgagtcctgaaaagaatggccaaaaatttaaggaactgtgattgctgcatgcaccaaattgtagcccatttctataactgtattcaatatggttattgtcaaggaaaactaggatagaaatttccttttaaagatttgctgttgtacttaggtaagtatatctgcttttaccactcaaaaacaattactttcttaagcaatttcaattttttcctttttaacaaccctgcacttgcacaaccctgcctctcttgcctcacactaatcctgaccctgctttcaattcaggctttgacagggaccaatggagattttaaggttttttaatgagagaagccttgctgacattccccccgtcccaccttgaaaattgcttaaagatgatcttaaaagaacctacagataatgctctgaatttgtttccaaggtccttgatgtggagagaatgagttatattaaatgctggagaaagacttatcatttagtgaaaaattaaacatgcttttctaaaatgtggatgtttaacagagcacagctgattgggaacacgggcagttcagtgcagctggagtgtctcacagggtgaagaggaacccagatcaagtggggaatagggatttcaaaaaccttctgaaggcttttaacatcagggcaaaagttttacagtgttatactttatattcttaatttaaacttatcagcgggaaggattcacaatgaaatgtctgttttgctcatgtaacaaggaataaaataatttattttattatttaaaataataagagcaaaaactggcggctatttgcaatctcaccctgccttgtgaggatgctgggtcttaaggaaggtcctaggattgctaaatagagtaatgggaataggaaactgaaagtttacttgctttgcataagagaaggaattatattgcagcagggaaggggcacaagaagataagagctagaagaacctgtgagaagggaaagaagtgacaaactaattttggctaaaataaagcaatttctcaggtcaggcgtggtggctcatgcctgtaatcccaacactttgggaggccaaagtgggaggaatgcttgaggccagtaattggagaccaaccagagcagtaggtcaagacctggtctctacaaaaaaaaaaaaaaaaaaaaaa

SEQ ID NO: 60 - RNA, 8090 nt, Macaca fascicularis
  source 1..8090: mol_type = mRNA
ttttttttttttttttttttttgtagagaccaggtcttgacctactgctctggttggtctccaattactggcctcaagcattcctcccactttggcctcccaaagtgttgggattacaggcatgagccaccacgcctgacctgagaaattgctttattttagccaaaattagtttgtcacttctttcccttctcacaggttcttctagctcttatcttcttgtgccccttccctgctgcaatataattccttctcttatgcaaagcaagtaaactttcagtttcctattcccattactctatttagcaatcctaggaccttccttaagacccagcatcctcacaaggcagggtgagattgcaaatagccgccagtttttgctcttattattttaaataataaaataaattattttattccttgttacatgagcaaaacagacatttcattgtgaatccttcccgctgataagtttaaattaagaatataaagtataacactgtaaaacttttgccctgatgttaaaagccttcagaaggtttttgaaatccctattccccacttgatctgggttcctcttcaccctgtgagacactccagctgcactgaactgcccgtgttcccaatcagctgtgctctgttaaacatccacattttagaaaagcatgtttaatttttcactaaatgataagtctttctccagcatttaatataactcattctctccacatcaaggaccttggaaacaaattcagagcattatctgtaggttcttttaagatcatctttaagcaattttcaaggtgggacggggggaatgtcagcaaggcttctctcattaaaaaaccttaaaatctccattggtccctgtcaaagcctgaattgaaagcagggtcaggattagtgtgaggcaagagaggcagggttgtgcaagtgcagggttgttaaaaaggaaaaaattgaaattgcttaagaaagtaattgtttttgagtggtaaaagcagatatacttacctaagtacaacagcaaatctttaaaaggaaatttctatcctagttttccttgacaataaccatattgaatacagttatagaaatgggctacaatttggtgcatgcagcaatcacagttccttaaatttttggccattcttttcaggactcaaaatagctcagcattcaattctataaggaccatgtttctttcccatggtacagtataagtaatttttaaggtaggtgaacatataataaaagtttgctagttgtagtacatatgaacaaaataaccacatgggttttatggcacatgttctaaaaagataaagatataatggagagatatctcattcaaacagcttaacattataaatggtgcaaatgagggccatagaagcaaagtgacatagtaaaatcaacaaatataaaaacctaagctgaaagaggaggtatggagattttttaaatagtcttgaaagataatagagattgctcataatttgaagtacacataattcaggatttgaaataaatctcctaaaattgtaaacatgccatattgtttaaatcattccatgtcctataggaatgacggtaataacttgcctatgtactttgtagcatcctgaaaatagtatactcatttaagtttataaatcgcaaaataaccatctctttaaagtggaacagcattcatcagggaatcattcacttatgaagaggtcaaccagacttggagacaagctattttttttggtgaatagaatatattgccatcgctactatttatcatccttgttttcaggaatgctttactacttattctcattatgataaactgtatctcaggcttttaggtatcatttaaaacacagttgtatggggaggttctatcactatccaaatacctttgcagggcccaaggctataaatatgaatatatttatacaaacctattttgttataatagggctttgggcgtactatacaaacctattttgtttaaggctataaatatgaatatatttatataaacctgttttgttataatagagcacaaggccctattataacaaaataggtatgctataaaactattataacaaaattggtatgttatagaactattataacaaaataggtttgtataaatatattacaggacaattatttactattacaggaaaattatttctcatccgtatatccaataattacataaaatggctgtgttttgaagttggagaacaaccacattctaaaaaggcacagagtgaaaaagaaaataagctcatattttactatatgtaaagggtgaaacagagaagtggttgaaaaatccatgttccatttaaagtcctcttattccagaattatagaatataattgattttatgtgattatcaagtataagctcttggaaattttgtgatgtaaaaatagaggcaaagctgtactcgttaataaaataaaacatttgattagcatatattgataaaataaaatattcatgattgtagtttttgttgaatttattaataatctttatatatatttatatatgtatggctttgagcaaagacaaaagaaatactctaactcatccctgatcatacaattgttgtaagaataagctattctattatcttcccagcaggagaaagaccaatcaataatacatttctttctgtacagattaaaactccatacgtacaggcttcactatgtacagagaaaagaggtcacttttcaactagcaatggacctttatattacaggaatgtgagtcattttttttttcttaatctaagtatatatacattcatacatatatgtatataatttaccctgtaccattttattagtttaacatataaaccttagtttttttgtccattctattacaaagtgaataaaaattgtatggttgcactgaaagaccatgcatttcaattttgcttatttttcccaatagtgctcaaaataaaaaaccaaaaatttatatatataaaaatatttcactaccaaatccattaatcctatcaaatgtaaacctttaataatttaaaggaccaatacatactcttaataaattgaagttaactctcatattttaataaaataaaggagttttatactgatatgtaaatggtcttgcagctttcccataggttctaggtagactgaacaatccctttcttacaacagtattcctgacatccatcatatgtcaccagcatactgatgattacattacattaactagcattgttaattacttccacacaaattggtatttgtttgaaattaaacataacaactcatttgggtattataggtattatatccgcaaaaggcataacaggcagcaaggattcactttagagtttttgctttttttttgttttctgtcctcaagtctatctgcaggccctgccccgtataatgtgtaatctctgtatgttcttaaatgtattgccaatgccagagatactgaagacctacacttacgtcatgctgttaacttgggttatttacagaagccagttattaggtatctttcaattgtgttccagtcatacgccacatgtgtgggatgcattaggcacaaatgattactaagggagttctttgagaagaagcaggtgctcacagatcatggaaagagttaagaaaatagacaaacaatgctcacagacattcaactttacccctgctttctgccaccatgtctgtactattttcaacacattaaaaaatgacaaacctcctatctaagggctacattagtcaccacatgccttaaagtttactaaccatttagttacaatatacatagagcaaaatgtgtgttcccaaacagacgtgatgctgtattgaatttatttctttaaattaacaccatagtaaattaccagctacagtgaagacatagacaatacttaactccaaatcaagctgtggtttacaaataattatttaaataataatagcaataatattaaataaaagtgaaaacctcacttctagacttaagtcagagatccaagtcagccttataggaattataagagaggcaattaatgaattgttatgcttttctagaaacgagaaatactgtaagcctttccctacaatggctgatttgaaccttttttttttttttccccaggagcatgcagggactattttcagatgcttgattatggcaagaagaaagaaaaataatgatttttggtgtaatacaagcaagttgtagattcgagcatacaattttgcataaaacattgcaggttaaaataatattgtaggtttcaagccattgcattacaattgaataattctcacaatcagattttgtgaaatttaaaactctaagttttgaagtgaagcgataaaactaaactcttaaacaatgacttttagcttcatacaacacagaatagctatttttatttgggttgaaaaagttatttacaactaacattgatcgagtcttggtaaaagtccgataacacatgaagacaaatattaattttccctcagctttctgaaagatcaatgaacatgtttgaggttagtgatactcttttcttttttctttctttctttctttttttttttttttttgagacggagtctcgctctgtcgcccaggctcgagtgcagtgcactatctctgctcactgcaagctccgcctcctgggttcaagccattctcctgcctcagcctccgaagtaggaggttagtgatattcttaacagtggcaatgctagtctcctacagtggccaagcaagtagtgcagtctttaacctaattcgaaattgaaagcaccgaaatacaatttagatctataaaatgggatttgttatttaattcttcatgattaatgattaacaatttagatgcacagtcacagctaatgaaagaaagttttgattggtgctatttgctagctcatttgagttgccttttttaaaatcagttttgtttccattgaatccaagaactcttcataaaacagagaaatatacatatcaaaggacttaagtaaaagtaggttagaaataaataatcttacaacaacattttaaatcctctaatgatttaaagaaaggaagacatataacactgaatgctaaacaggtcttttgaccctctcttgagaatttagatatatattttatagtatatgtatatatattttacatttcacgtgtaggccagagctgtctaaaatatctcttcatagtaggctagagggatctatcaggagatagaataaaataagatctgagtatagtctcagtttatgagagtatttctttctgctttgacaatcagcagggatcataaatttgaagcaaatcgtggcttttctgcgtctgggtctgtgtttaagactgaggaagactctctcggaagagcagctgctggtggagggggtgctggagggactcctcggttgggggggatggctcccgacgacatctgtcggaagagggtgacgcgctgcgggacagtgctcctgccccctgcctgaaggcccgttccggggaccgccgtcacgggttgagggatggaggccagggactcgcccacagtgggatgaggtctggaaatcagagtggacacctcatggggcagcgagggctgcgaggcggagaggggcctgacttcccgggtcaggttggtgttgtgaagcgcctgcgtgctcttgtgcacttcgtttttcggcgtggagctgccaggtgtctgtggctgcggagacggctgctgtggctgagtctgcggcggctgggactgctgtacctgctgctgaggctgctgttgcatgagtgacagctgagaggcggtgggggaggcatagtggaaagttcgagcggccagagggctctgtacaggagggctgcagacggcggtggtgtaggagcagggtgaaaggatggctgatggctggggggtctgtgtgctgggactgggggaatgcaggttgctgtgagacaggctggtcgctgtgtacactggtggagattgtgtcctcatgcgggaggtcggggtcgtagttgacgatgtggaattcagggttgtcatttgaggataattgatgggagcgattgcctgcaccatctccctgtcatgtttcacaatctgcttgaggatttcgttctcctgattgttgaaaacaccagtgttcagatccttctggaacttttgcagaagaattgaatttttctttcctattcgatctagtcggtcaatggcaactgtctcaaaggctctcctcatcattggatattcctccaggacctcgttgaaattgtccacagaaagtgagtaaagacgacaatatgtatcagctcgaacactggcagtacgacgtcctttggtcagcaggcaaatctctccaaagtaagagccatctgtcagcttcatttctttactggattttgtaatgacaccagcaacaccatgttgaatgaaatacatttttttacccacggctccttctcgtatgatataatctccaggttgaaacacctcaaatctcaacttgctcagcatggcagtcacaaaattaggatccgcattagcaaataaaggcattgtagccaccagtttccgacagttgaagttgactatctcctctctcagaggatcattgagttcattgagaatattttcctcatcaaagattttgccttggtatctgtgttcatagtaatcatgtatcttctgacgcatatcagctggtaacttatggaatgacatgtattgttccacttgcttatacttctcttgatactgccgcctcgaagaatccagagactggattaaagcagtggcatggccgacaaacatggcatagcaggtggccccgacgatcatgctcagcatggtaatccagaggtcagacatgctgactggggcttgggctccatacccaatgcacagcatgtgactcatagctttgaagagtgcgtatgaatactgctttccccaagaatcattaaccatttcatttaaagacacccagcaatctggtgggaagtcctgcagtagtggtactaagaactgaagacaaccatcccagtgacacaggagcagcatcatgccgatgagattaaaaattctcaccactgcactggcaagatcatacgtcatgtggaatatctcttcccactgatgtatgtatctaattaaccttgaaagtcgtaataaacgcaagagactgagaatttttgtaaacctcacaatgcgaagtgccctggctgtcttgtaaacttctgaatccattcctttttctacaataagaaagatataatccactgggatggatgagatgaagtcaaccacaaaccagctttttaaataattcatcttgatcactttggggtccaggatgatttcagaactgtcttcgttgacagttccagtcctaaaattcatgatcaggtccagtaggaaaactgtatctgatgccacattgaaaataatccatggtgttgttgtttgctctgtaaagaatgtgattccaactggtatgatgactagatttccaaccatcattataagcattattaaatcccaataaaacctgaaatcactgtaagggtggataatccagaagcctgcagttttaaccctttcctgctccttttccaccgccttctggctcccaaacatgcggagggagaatttgttgactccgggttgcagcatggaggtgaactgcctctgcatgaagccgtactgccgccggggcccctcggcgtcctcaaagcccccagccggctcctcgccgccgcctccgccgccgccgtccaccttgaagcacacggagttgccgtgctccttcgcgccggccccgccgccccccggcggggtgcccaagcgtttctcggccgcggccggccccgcgcccgtcgcggacgccttggcggggaagacgctgttgccatcgtcccggctgttagacgaagagttgggcttgccacctccttccatgcccggaggacgcggccggcgacggcgcgggctccagactcgccggcagcccggcgccggggacacgtagccgagagggta

SEQ ID NO: 61 - RNA, 6922 nt, Homo sapiens
  source 1..6922: mol_type = mRNA
gctggagccgctcctatggcaacccgcgagctgcggcggcttcatgaatattccggggcgcgggagcccgagcgctgccggagggcgcttcgggggaggcggccgctgatgtaagcccggcgggtcgctgggctccgctcggttgcggcgggagccccgggacgggccggacgggccggggcagaggaggcgaggcgagctcgcgggtggccagccacaaagcccgggcggcgagacagacggacagccagccctcccgcgggacgcacgcccgggacccgcgcgggccgtgcgctctgcactccggagcggttccctgagcgccgcggccgcagagcctctccggccggcgcccattgttccccgcgggggcggggcgcctggagccgggcggcgcgccgcgcccctgaacgccagagggagggagggaggcaagaagggagcgcggggtccccgcgcccagccgggcccgggaggaggtgtagcgcggcgagcccggggactcggagcgggactaggatcctccccgcggcgcgcagcctgcccaagcatgggcgcctgaggctgcccccacgccggcggcaaaggacgcgtccccacgggcggactgaccggcgggcggacctggagcccgtccgcggcgccgcgctcctgcccccggcccggtccgaccccggcccctggcgccatggacaagctgccgccgtccatgcgcaagcggctctacagcctcccgcagcaggtgggggccaaggcgtggatcatggacgaggaagaggacgccgaggaggagggggccgggggccgccaagaccccagccgcaggagcatccggctgcggccactgccctcgccctccccctcggcggccgcgggtggcacggagtcccggagctcggccctcggggcagcggacagcgaagggccggcccgcggcgcgggcaagtccagcacgaacggcgactgcaggcgcttccgcgggagcctggcctcgctgggcagccggggcggcggcagcggcggcacggggagcggcagcagtcacggacacctgcatgactccgcggaggagcggcggctcatcgccgagggcgacgcgtcccccggcgaggacaggacgcccccaggcctggcggccgagcccgagcgccccggcgcctcggcgcagcccgcagcctcgccgccgccgccccagcagccaccgcagccggcctccgcctcctgcgagcagccctcggtggacaccgctatcaaagtggagggaggcgcggctgccggcgaccagatcctcccggaggccgaggtgcgcctgggccaggccggcttcatgcagcgccagttcggggccatgctccaacccggggtcaacaaattctccctaaggatgttcggcagccagaaagccgtggagcgcgaacaggagagggtcaagtcggccggattttggattatccacccctacagtgacttcagattttactgggacctgaccatgctgctgctgatggtgggaaacctgattatcattcctgtgggcatcaccttcttcaaggatgagaacaccacaccctggattgtcttcaatgtggtgtcagacacattcttcctcatcgacttggtcctcaacttccgcacagggatcgtggtggaggacaacacagagatcatcctggacccgcagcggattaaaatgaagtacctgaaaagctggttcatggtagatttcatttcctccatccccgtggactacatcttcctcattgtggagacacgcatcgactcggaggtctacaagactgcccgggccctgcgcattgtccgcttcacgaagatcctcagcctcttacgcctgttacgcctctcccgcctcattcgatatattcaccagtgggaagagatcttccacatgacctacgacctggccagcgccgtggtgcgcatcgtgaacctcatcggcatgatgctcctgctctgccactgggacggctgcctgcagttcctggtacccatgctacaggacttccctgacgactgctgggtgtccatcaacaacatggtgaacaactcctgggggaagcagtactcctacgcgctcttcaaggccatgagccacatgctgtgcatcggctacgggcggcaggcgcccgtgggcatgtccgacgtctggctcaccatgctcagcatgatcgtgggtgccacctgctacgccatgttcattggccacgccactgccctcatccagtccctggactcctcccggcgccagtaccaggaaaagtacaagcaggtggagcagtacatgtcctttcacaagctcccgcccgacacccggcagcgcatccacgactactacgagcaccgctaccagggcaagatgttcgacgaggagagcatcctgggcgagctaagcgagcccctgcgggaggagatcatcaactttaactgtcggaagctggtggcctccatgccactgtttgccaatgcggaccccaacttcgtgacgtccatgctgaccaagctgcgtttcgaggtcttccagcctggggactacatcatccgggaaggcaccattggcaagaagatgtacttcatccagcatggcgtggtcagcgtgctcaccaagggcaacaaggagaccaagctggccgacggctcctactttggagagatctgcctgctgacccggggccggcgcacagccagcgtgagggccgacacctactgccgcctctactcgctgagcgtggacaacttcaatgaggtgctggaggagtaccccatgatgcgaagggccttcgagaccgtggcgctggaccgcctggaccgcattggcaagaagaactccatcctcctccacaaagtccagcacgacctcaactccggcgtcttcaactaccaggagaatgagatcatccagcagattgtgcagcatgaccgggagatggcccactgcgcgcaccgcgtccaggctgctgcctctgccaccccaacccccacgcccgtcatctggaccccgctgatccaggcaccactgcaggctgccgctgccaccacttctgtggccatagccctcacccaccaccctcgcctgcctgctgccatcttccgccctcccccaggatctgggctgggcaacctcggtgccgggcagacgccaaggcacctgaaacggctgcagtccctgatcccttctgcgctgggctccgcctcgcccgccagcagcccgtcccaggtggacacaccgtcttcatcctccttccacatccaacagctggctggattctctgcccccgctggactgagcccactcctgccctcatccagctcctccccaccccccggggcctgtggctccccctcggctcccacaccatcagctggcgtagccgccaccaccatagccgggtttggccacttccacaaggcgctgggtggctccctgtcctcctccgactctcccctgctcaccccgctgcagccaggcgcccgctccccgcaggctgcccagccatctcccgcgccacccggggcccggggaggcctgggactcccggagcacttcctgccacccccaccctcatccagatccccgtcatctagccccgggcagctgggccagcctcccggggagttgtccctaggtctggccactggcccactgagcacgccagagacacccccacggcagcctgagccgccgtcccttgtggcaggggcctctgggggggcttcccctgtaggctttactccccgaggaggtctcagcccccctggccacagcccaggccccccaagaaccttcccgagtgccccgccccgggcctctggctcccacggatccttgctcctgccacctgcatccagccccccaccaccccaggtcccccagcgccggggcacacccccgctcacccccggccgcctcacccaggacctcaagctcatctccgcgtctcagccagccctgcctcaggacggggcgcagactctccgcagagcctccccgcactcctcaggggagtccatggctgccttcccgctcttccccagggctgggggtggcagcgggggcagtgggagcagcgggggcctcggtccccctgggaggccctatggtgccatccccggccagcacgtcactctgcctcggaagacatcctcaggttctttgccaccccctctgtctttgtttggggcaagagccacctcttctggggggccccctctgactgctggaccccagagggaacctggggccaggcctgagccagtgcgctccaaactgccatccaatctatgagctgggcccttccttccctcttctttcttcttttctctcccttccttcttccttcaggtttaactgtgattaggagatataccaataacagtaataattatttaaaaaaccacacacaccagaaaaacaaaagacagcagaaaataaccaggtattcttagagctatagatttttggtcacttgcttttatagactattttaatactcagcactagagggagggagggggagggaggagggagcaggcaggtcccaaatgcaaaagccagagaaaggcagatggggtctccggggctgggcaggggtgggagtggccagtgttggcggttcttagagcagatgtgtcattgtgttcatttagagaaacagctgccatcagcccgttagctgtaacttggagctccactctgcccccagaaaggggctgccctggggtgtgccctggggagcctcagaagcctgcgaccttgggagaaaagggccagggccctgagggcctagcattttttctactgtaaacgtagcaagatctgtatatgaatatgtatatgtatatgtatgtaagatgtgtatatgtatagctatgtagcgctctgtagagccatgtagatagccactcacatgtgcgcacacgtgtgcggtctagtttaatcccatgttgacaggatgcccaggtcaccttacacccagcaacccgccttggcccacaggctgtgcactgcatggtctagggacgttctctctccagtcctcagggaagaggaccccaggacttcgcagcaggccccctctctccccatctctggtctcaaagccagtcccagcctgacctctcaccacacggaagtggaagactcccctttcctagggcctcaagcacacaccgccacctctggggccgtcagtttgcccatctgtacagtgggaggtgagcggaacttctgtttattgagtctgctctgtgccaagcactggtttcgcactttacacacattaactccttcagtttcacaaagaccatggggtgggtactttgattctccccatttagcagaggaagaaacagttttgggtaatttttccagaatcatgtaactaggagtggcagagtggggactgatttgaggttcgagtccacgcctccttgaggcccaagtctgtgttccttccatcagaaaactgtgttgaggggggctgaggtagatggtccccaagcatggtacagaaggaagacaccagattttggcagcagtcaggcctgggtttgaatcccagccctgccacttcttagctgtatgatcttgggcaagttatctgacctttctgtcacctcatttgtaaaatgggaataattatggtactgcctcacaaggacctatgaggaccagatgagaaaaatctatatgtgaaatgcccagcccagcgcctggcacataccatggtaggtgctcaataaaaaatcacatttcttctgcccctcatatgcccagcctattgctccagcaaactatgtgagagcccagggagctttggctgagggctccaagacttaaaatctcaggactcaggaggtggctgggcctccctaagggcccaaggaaggtgtgtggccagaggtgggtgggagccaggccttgagaagtgggaagacttcaacagggagagagggagggaatggtgggtgggatggagtgtatggtggggagattcctgaggtggatgtggagtggtggatcagggctttgggaggggatccccaggctgaggggtcagagggacggccttgggtgatagggtaagggattgtctgggcttagtcctggcaactaggagccataagcaggttccagattgcgggaacgagaaagcagctcagatgcctttggaggcaccatcctccctcctcccagatgggatcttgccagagccaaggtcaggggtctgcccctgcctatagggccagagcaggtatggctgcaatccccaagtaatgagaagggctggtcccacattatccatccagaaccttccatgctccaagccagaatgttggcaagatcgggttttgccttgagctatcctgggatgtgagacaaaccgatttctccatagatgggctgcagggagtgggaggcagtactccaggagagaagtgggtgaaggttcctgggatcttaggtaaagactagacgccgcctagtactggtctctactgtgctggctcaggagttctgagaactggaaggacttagcctcaacctgagttctgcacacaccccttccccttaaggaaggcagctctgagaggcagcaggacttgatccaaacccacagtcttgtcctggaggcagcaggggtgaaggtggagggtccagggccatgaggagcccccttgccatcagagcctggcctaaccaccctcttctctacttacacacacatgcattttataatagctctgacccaacctggccactctgcagagactgggacagacaggtgcaggcaatgggccctcccacacccagtcacctacaaggaattttcaaatccacttttaaaacagaaaccggtaaatgcgccgtattgtatattttatttaaataaaaaaaattccagca

SEQ ID NO: 62 - RNA, 6922 nt, Homo sapiens
  source 1..6922: mol_type = mRNA
tgctggaattttttttatttaaataaaatatacaatacggcgcatttaccggtttctgttttaaaagtggatttgaaaattccttgtaggtgactgggtgtgggagggcccattgcctgcacctgtctgtcccagtctctgcagagtggccaggttgggtcagagctattataaaatgcatgtgtgtgtaagtagagaagagggtggttaggccaggctctgatggcaagggggctcctcatggccctggaccctccaccttcacccctgctgcctccaggacaagactgtgggtttggatcaagtcctgctgcctctcagagctgccttccttaaggggaaggggtgtgtgcagaactcaggttgaggctaagtccttccagttctcagaactcctgagccagcacagtagagaccagtactaggcggcgtctagtctttacctaagatcccaggaaccttcacccacttctctcctggagtactgcctcccactccctgcagcccatctatggagaaatcggtttgtctcacatcccaggatagctcaaggcaaaacccgatcttgccaacattctggcttggagcatggaaggttctggatggataatgtgggaccagcccttctcattacttggggattgcagccatacctgctctggccctataggcaggggcagacccctgaccttggctctggcaagatcccatctgggaggagggaggatggtgcctccaaaggcatctgagctgctttctcgttcccgcaatctggaacctgcttatggctcctagttgccaggactaagcccagacaatcccttaccctatcacccaaggccgtccctctgacccctcagcctggggatcccctcccaaagccctgatccaccactccacatccacctcaggaatctccccaccatacactccatcccacccaccattccctccctctctccctgttgaagtcttcccacttctcaaggcctggctcccacccacctctggccacacaccttccttgggcccttagggaggcccagccacctcctgagtcctgagattttaagtcttggagccctcagccaaagctccctgggctctcacatagtttgctggagcaataggctgggcatatgaggggcagaagaaatgtgattttttattgagcacctaccatggtatgtgccaggcgctgggctgggcatttcacatatagatttttctcatctggtcctcataggtccttgtgaggcagtaccataattattcccattttacaaatgaggtgacagaaaggtcagataacttgcccaagatcatacagctaagaagtggcagggctgggattcaaacccaggcctgactgctgccaaaatctggtgtcttccttctgtaccatgcttggggaccatctacctcagcccccctcaacacagttttctgatggaaggaacacagacttgggcctcaaggaggcgtggactcgaacctcaaatcagtccccactctgccactcctagttacatgattctggaaaaattacccaaaactgtttcttcctctgctaaatggggagaatcaaagtacccaccccatggtctttgtgaaactgaaggagttaatgtgtgtaaagtgcgaaaccagtgcttggcacagagcagactcaataaacagaagttccgctcacctcccactgtacagatgggcaaactgacggccccagaggtggcggtgtgtgcttgaggccctaggaaaggggagtcttccacttccgtgtggtgagaggtcaggctgggactggctttgagaccagagatggggagagagggggcctgctgcgaagtcctggggtcctcttccctgaggactggagagagaacgtccctagaccatgcagtgcacagcctgtgggccaaggcgggttgctgggtgtaaggtgacctgggcatcctgtcaacatgggattaaactagaccgcacacgtgtgcgcacatgtgagtggctatctacatggctctacagagcgctacatagctatacatatacacatcttacatacatatacatatacatattcatatacagatcttgctacgtttacagtagaaaaaatgctaggccctcagggccctggcccttttctcccaaggtcgcaggcttctgaggctccccagggcacaccccagggcagcccctttctgggggcagagtggagctccaagttacagctaacgggctgatggcagctgtttctctaaatgaacacaatgacacatctgctctaagaaccgccaacactggccactcccacccctgcccagccccggagaccccatctgcctttctctggcttttgcatttgggacctgcctgctccctcctccctccccctccctccctctagtgctgagtattaaaatagtctataaaagcaagtgaccaaaaatctatagctctaagaatacctggttattttctgctgtcttttgtttttctggtgtgtgtggttttttaaataattattactgttattggtatatctcctaatcacagttaaacctgaaggaagaaggaagggagagaaaagaagaaagaagagggaaggaagggcccagctcatagattggatggcagtttggagcgcactggctcaggcctggccccaggttccctctggggtccagcagtcagagggggccccccagaagaggtggctcttgccccaaacaaagacagagggggtggcaaagaacctgaggatgtcttccgaggcagagtgacgtgctggccggggatggcaccatagggcctcccagggggaccgaggcccccgctgctcccactgcccccgctgccacccccagccctggggaagagcgggaaggcagccatggactcccctgaggagtgcggggaggctctgcggagagtctgcgccccgtcctgaggcagggctggctgagacgcggagatgagcttgaggtcctgggtgaggcggccgggggtgagcgggggtgtgccccggcgctgggggacctggggtggtggggggctggatgcaggtggcaggagcaaggatccgtgggagccagaggcccggggcggggcactcgggaaggttcttggggggcctgggctgtggccaggggggctgagacctcctcggggagtaaagcctacaggggaagcccccccagaggcccctgccacaagggacggcggctcaggctgccgtgggggtgtctctggcgtgctcagtgggccagtggccagacctagggacaactccccgggaggctggcccagctgcccggggctagatgacggggatctggatgagggtgggggtggcaggaagtgctccgggagtcccaggcctccccgggccccgggtggcgcgggagatggctgggcagcctgcggggagcgggcgcctggctgcagcggggtgagcaggggagagtcggaggaggacagggagccacccagcgccttgtggaagtggccaaacccggctatggtggtggcggctacgccagctgatggtgtgggagccgagggggagccacaggccccggggggtggggaggagctggatgagggcaggagtgggctcagtccagcgggggcagagaatccagccagctgttggatgtggaaggaggatgaagacggtgtgtccacctgggacgggctgctggcgggcgaggcggagcccagcgcagaagggatcagggactgcagccgtttcaggtgccttggcgtctgcccggcaccgaggttgcccagcccagatcctgggggagggcggaagatggcagcaggcaggcgagggtggtgggtgagggctatggccacagaagtggtggcagcggcagcctgcagtggtgcctggatcagcggggtccagatgacgggcgtgggggttggggtggcagaggcagcagcctggacgcggtgcgcgcagtgggccatctcccggtcatgctgcacaatctgctggatgatctcattctcctggtagttgaagacgccggagttgaggtcgtgctggactttgtggaggaggatggagttcttcttgccaatgcggtccaggcggtccagcgccacggtctcgaaggcccttcgcatcatggggtactcctccagcacctcattgaagttgtccacgctcagcgagtagaggcggcagtaggtgtcggccctcacgctggctgtgcgccggccccgggtcagcaggcagatctctccaaagtaggagccgtcggccagcttggtctccttgttgcccttggtgagcacgctgaccacgccatgctggatgaagtacatcttcttgccaatggtgccttcccggatgatgtagtccccaggctggaagacctcgaaacgcagcttggtcagcatggacgtcacgaagttggggtccgcattggcaaacagtggcatggaggccaccagcttccgacagttaaagttgatgatctcctcccgcaggggctcgcttagctcgcccaggatgctctcctcgtcgaacatcttgccctggtagcggtgctcgtagtagtcgtggatgcgctgccgggtgtcgggcgggagcttgtgaaaggacatgtactgctccacctgcttgtacttttcctggtactggcgccgggaggagtccagggactggatgagggcagtggcgtggccaatgaacatggcgtagcaggtggcacccacgatcatgctgagcatggtgagccagacgtcggacatgcccacgggcgcctgccgcccgtagccgatgcacagcatgtggctcatggccttgaagagcgcgtaggagtactgcttcccccaggagttgttcaccatgttgttgatggacacccagcagtcgtcagggaagtcctgtagcatgggtaccaggaactgcaggcagccgtcccagtggcagagcaggagcatcatgccgatgaggttcacgatgcgcaccacggcgctggccaggtcgtaggtcatgtggaagatctcttcccactggtgaatatatcgaatgaggcgggagaggcgtaacaggcgtaagaggctgaggatcttcgtgaagcggacaatgcgcagggcccgggcagtcttgtagacctccgagtcgatgcgtgtctccacaatgaggaagatgtagtccacggggatggaggaaatgaaatctaccatgaaccagcttttcaggtacttcattttaatccgctgcgggtccaggatgatctctgtgttgtcctccaccacgatccctgtgcggaagttgaggaccaagtcgatgaggaagaatgtgtctgacaccacattgaagacaatccagggtgtggtgttctcatccttgaagaaggtgatgcccacaggaatgataatcaggtttcccaccatcagcagcagcatggtcaggtcccagtaaaatctgaagtcactgtaggggtggataatccaaaatccggccgacttgaccctctcctgttcgcgctccacggctttctggctgccgaacatccttagggagaatttgttgaccccgggttggagcatggccccgaactggcgctgcatgaagccggcctggcccaggcgcacctcggcctccgggaggatctggtcgccggcagccgcgcctccctccactttgatagcggtgtccaccgagggctgctcgcaggaggcggaggccggctgcggtggctgctggggcggcggcggcgaggctgcgggctgcgccgaggcgccggggcgctcgggctcggccgccaggcctgggggcgtcctgtcctcgccgggggacgcgtcgccctcggcgatgagccgccgctcctccgcggagtcatgcaggtgtccgtgactgctgccgctccccgtgccgccgctgccgccgccccggctgcccagcgaggccaggctcccgcggaagcgcctgcagtcgccgttcgtgctggacttgcccgcgccgcgggccggcccttcgctgtccgctgccccgagggccgagctccgggactccgtgccacccgcggccgccgagggggagggcgagggcagtggccgcagccggatgctcctgcggctggggtcttggcggcccccggccccctcctcctcggcgtcctcttcctcgtccatgatccacgccttggcccccacctgctgcgggaggctgtagagccgcttgcgcatggacggcggcagcttgtccatggcgccaggggccggggtcggaccgggccgggggcaggagcgcggcgccgcggacgggctccaggtccgcccgccggtcagtccgcccgtggggacgcgtcctttgccgccggcgtgggggcagcctcaggcgcccatgcttgggcaggctgcgcgccgcggggaggatcctagtcccgctccgagtccccgggctcgccgcgctacacctcctcccgggcccggctgggcgcggggaccccgcgctcccttcttgcctccctccctccctctggcgttcaggggcgcggcgcgccgcccggctccaggcgccccgcccccgcggggaacaatgggcgccggccggagaggctctgcggccgcggcgctcagggaaccgctccggagtgcagagcgcacggcccgcgcgggtcccgggcgtgcgtcccgcgggagggctggctgtccgtctgtctcgccgcccgggctttgtggctggccacccgcgagctcgcctcgcctcctctgccccggcccgtccggcccgtcccggggctcccgccgcaaccgagcggagcccagcgacccgccgggcttacatcagcggccgcctcccccgaagcgccctccggcagcgctcgggctcccgcgccccggaatattcatgaagccgccgcagctcgcgggttgccataggagcggctccagc

SEQ ID NO: 63 - RNA, 6581 nt, Mus musculus
  source 1..6581: mol_type = mRNA
agaggcggaggctgatgtaagcccggcgggccgctgggctccgctccgctgcggcgggagtccccaggactcggccggctgggctcagctagaggaggcaaagcgagaacccgggtgaccagctgcaaagcccgggcggtcacacgcgctgacagccccagacacccgccggacgcactcccgggaaccgcgcgggcagtgcgctctgcgctcgggagcggttcccggagcgcggtggccgcagcgccgccgctgcccgcgcccattgttccccgcgggggcggggcgcctggagccgggccgcgcgccgcgcccctgatcgcaggagggagggaaaagagggagggagcgtggggtccccgcgcccaagccgggcccgggaggaggtgcagcgcggcgaacccggggacctgcagccggactaggagcctcccctcggcgcgcagcccgcgcgatcatgggctcgtgaggcagcgaaggacgcgtcctcactggcaggcgcacctggagcgggtcccccgtgccgcacccgcaccgctgcccccggcccaatccctggcaccatggacaagctgccgccgtccatgcgcaagcggctctacagccttccgcagcaggtgggggccaaggcgtggatcatggacgaggaagaggatggtgaggaagaaggggccgggggccgccaggaccccagccgaaggagcatccggctgcggccgctgccctcgccctctccctcggtggctgcgggctgctcggagtcccggggtgcggccctcggggcgacagagagcgaggggccgggccgcagcgccggcaagtccagcaccaacggtgactgcaggcgcttccgcgggagtctggcctcgctgggcagccggggcggcggcagtggtggagcagggggcggcagcagtctcgggcacctgcatgactccgcggaggaacggcggctcatcgccgctgagggcgatgcgtcccccggcgaggacaggacgcccccgggcctggcgaccgaacccgagcgcccggccaccgcggcacaacccgcagcctcgccgccgccccagcagccgccgcagccggcctctgcctcctgcgagcagccctcggcggacaccgctatcaaagtggagggaggcgcggccgccagcgaccagatcctccccgaggccgaggtgcgcctgggccagagcggcttcatgcagcgccagttcggtgccatgctgcaacctggggtcaacaaattctccctaaggatgttcggcagccagaaagcggtggagcgcgagcaggagagggttaagtcagcagggttttggattatccacccctacagtgacttcagattttactgggacctgacgatgctgttgctgatggtggggaatctgatcatcatacccgtgggcatcaccttcttcaaggatgagaacaccacaccctggatcgtcttcaatgtggtgtcagacacattcttcctcattgacttggtcctcaacttccgcacggggatcgtggtggaggacaacacagaaatcatccttgacccgcagaggatcaagatgaagtacctgaaaagctggtttgtggtagatttcatctcctccatccctgtcgactacatcttccttatagtggagactcgcattgactcggaggtctacaaaaccgctagggctctgcgcattgtccgtttcactaagatcctcagcctcctgcgcctcttgaggctttcccgcctcattcgatacattcatcagtgggaagagatcttccacatgacctatgacctggccagcgccgtggtacgcatcgtgaacctcattggcatgatgcttctgctgtgtcactgggatggctgcctgcagttcctagtgcccatgctgcaggacttcccccatgactgctgggtgtccatcaatggcatggtgaataactcctgggggaagcagtattcctacgccctcttcaaggccatgagccacatgctgtgcattgggtatggacggcaggcacccgtaggcatgtctgacgtctggctcaccatgctcagcatgatcgtgggggccacctgctatgccatgttcatcggccacgccactgccctcatccagtcgctagactcctcccggcgccagtaccaggagaagtataaacaggtggagcagtacatgtccttccacaagctcccgcctgacacccgacagcgcatccatgactactatgaacaccgctaccaaggcaagatgtttgatgaggaaagcatcctgggtgagctgagtgagccacttcgagaggagatcatcaactttaactgccgaaagctggtggcatccatgccactgtttgccaacgcagatcccaactttgtgacatccatgctgaccaagttgcgtttcgaggtcttccagcctggggattacatcatccgcgaaggcaccatcggcaagaagatgtactttatccagcacggcgtggtcagcgtgctcactaagggcaacaaagagaccaagctggctgatggctcctattttggagagatctgcttgctgacccggggtcggcgcacagccagcgtcagagcggatacttattgccgcctctactcactgagcgtggacaacttcaatgaggtgctggaggagtatcccatgatgcggagggccttcgagacggttgcgctggaccgcctggaccgcataggcaagaagaactccatcctcctccacaaggtgcagcacgacctcaactcaggcgtcttcaactaccaagagaacgagatcatccagcagatcgtgcggcatgaccgtgagatggcccactgtgctcaccgcgtccaggctgccgcctcagccaccccaacccccacgcctgttatatggaccccgctgatccaggcgccactgcaggctgctgctgctactacttcggtggccatagccctcacacaccacccccgcctgcccgccgccatcttccggccccctcccggacctgggctgggcaaccttggggctggacagacaccgaggcacccaaggaggctgcagtccttgatcccttcagctctgggctctgcttcacccgccagcagcccctcacaggtggacacaccgtcttcatcctccttccacatccaacagctggctggattctctgcacctcctggattgagccctctcctgccctcctctagctcttccccacctccaggagcctgcggttccccaccagcccccacaccctccacctccactgccgccgccgcctccaccactgggttcggccactttcacaaggcgctgggtggctccctgtcatcctctgactccccgctgctcaccccactgcaaccaggcgctcgctctccacaggctgcccagccaccacccccactgcctggggcccgaggaggtctgggactcctggagcacttcttgccgcccccaccctcctccaggtcaccatcatccagccctgggcagctgggccagcctcctggagagttgtccctaggtctggcagctggtccatcaagtacaccagagacacccccacggcctgagcgaccatccttcatggcaggggcctctggaggggcttctcctgtagcctttaccccccgaggaggcctcagtcctccgggccacagcccggggcccccaagaactttcccgagtgccccaccccgggcctctggctcccatggttccctgctcctgccacctgcatccagccctccacctccccaggtcccacagcgcaggggcacaccacccctcacccctggccgcctcacacaggacctgaagctcatctcagcctctcagccagccctcccccaggatggggcacagactctccgcagggcctcgcctcactcctcaggggagtcggtggctgccttctcactctaccccagagctgggggtggcagtgggagtagtgggggccttgggcctcctggaaggccatatggtgccatcccaggccaacatgtcactttgcctcggaagacatcctcaggttctttgccacccccactttctttgtttggggcaagagccgcctcttctggagggccccctctgactactgctgcaccccagagggaacctggcgctaggtctgagccagtacgctccaaactgccgtctaatttatgagctgggccctccctccctcttctttttcttgctcctttcttccttcaggtttaactgtgattaggagatataccaacaacaataataaccataaaaaaacataccccagaaaaacaaaaagacagcagaaaataaccaggtattcttagagctatagatttttggtcacttgcttttatagactattttaatactcagcactagagggagagagggagggagggagggaggggggagcagacaaggcccaaaggcaacagccaaaggaagacaggcggggtctctggggacagggcaggggtggggtgacccgtgtttgggtcctagcatagacctgtcattgtattgttctgtagagcaagagctacctaccatcaatcagttccttggctgtgaacttggagcccactctgctgggggctgccctggagtgtgttcccaggagcctcctgcgcccaagttccttgggacacacagggcccttgagggccttgctttttttttttctactgtaaacgtagcaagatatgtatatgaatatgtatatgtatgtaagatgtgtctatgtatagctatgtagtgctctgtagagccgtgtagatatcagcttccatgtgtgcacattcgtgtgcagtctagtttaatcccatgttgccaggacacccaggtcaccttacatccagcaatctgctgtggcccgcaggctgggcactgcaggctctgggggaagttctctctcccagccctcagggaaggggacccctggaaccttgcagcagaccctctttccccatctctgggctgcaacccagttctagcccaacctctagtcccatggaaggggaagactccaggccgagcctttcacctcccagggcttcaagcacacctgtcacctctgtggcccgaagtttctccagctgtacaacgggaggggaggggaacgtctatttattgagtctgttctgtgccaagcactggttatacatactcacagactggggggtgaggattatggtttctcccatttcacaggtgaggaaactgagggttgattagaatcacataaccaggagtggcagagctggtctggtctgagctgcaaatcaacctccctaaggttaaagcctgtattcctcccatcagaaaactgtgtttggtacagccctagcttttggtccctaggcaaagtacaggaggaagagatgggagcttggtagcagtcagacttcagttcaaatcccagttctgccacttcttagctgtgtggccttgggcaagttatctgacctttctgttccctcattagtaaaataagaactatggaactgcctcacaatgaccagtgagaaccagataagaaaaagatgtgaaacgcccagcccagtgcctggcacacagcatagtaggtgctcaataaatcatgtttcttcaccacccccccccctcataaacttagcccattgctccagtgaactatgatgagagcccaggggattttagctgagggctccaagacttaaaactctcaggactcaggaggtggctgggcctccatcatggctggaggaaggtgcgtggccagtggtgggcttgagtcaggccttgggatatgggaagtgtgggtaaagaaaggaattagaggagagagtgcataggagaggttactgcagtgatgttgagatgtggggcagggcctctgggggagacatagaggatggggacctcggatgagaggctaagctgatctgtggctttggccctgaattagaagcagatgtcaggaccctggaggaggcacagccaacagcttccctatccatgggtcggagcaggtaggactgatgcccgtgcagtgagggggctggttctaccatgcctgtcatccccatgcagcagccagaagggtggcatgagcaggtttggccctggggtgccacagggaatcctttgtgggtggcttgcagggaaagagagggtgaagtccctggtgccctagaaaatctgcaggagccctaggttatacagggctgggagaagcctcccagactgagagtcttcggacctgtgttctgtcccccaaggaagggagcttagggagccagctggacgccacagaacctgcagtccacccttgaggaataggagaggagctggggtctgggataaggagtgaggggtctcttgtcaacaggcctggcctagccacccttctctactgatacatgcattttataaacaccgacacactggcaaactccttggtgactatggagaggccaggtccagtccataggaccttctaccccacaacctctacaagcaattttcaaatcttccacttttaaaacagaaaaacggtcaaacacaccgtcttgtatattttatttaaataaaaaaaattacagcaaa

SEQ ID NO: 64 - RNA, 6581 nt, Mus musculus
  source 1..6581: mol_type = mRNA
tttgctgtaattttttttatttaaataaaatatacaagacggtgtgtttgaccgtttttctgttttaaaagtggaagatttgaaaattgcttgtagaggttgtggggtagaaggtcctatggactggacctggcctctccatagtcaccaaggagtttgccagtgtgtcggtgtttataaaatgcatgtatcagtagagaagggtggctaggccaggcctgttgacaagagacccctcactccttatcccagaccccagctcctctcctattcctcaagggtggactgcaggttctgtggcgtccagctggctccctaagctcccttccttgggggacagaacacaggtccgaagactctcagtctgggaggcttctcccagccctgtataacctagggctcctgcagattttctagggcaccagggacttcaccctctctttccctgcaagccacccacaaaggattccctgtggcaccccagggccaaacctgctcatgccacccttctggctgctgcatggggatgacaggcatggtagaaccagccccctcactgcacgggcatcagtcctacctgctccgacccatggatagggaagctgttggctgtgcctcctccagggtcctgacatctgcttctaattcagggccaaagccacagatcagcttagcctctcatccgaggtccccatcctctatgtctcccccagaggccctgccccacatctcaacatcactgcagtaacctctcctatgcactctctcctctaattcctttctttacccacacttcccatatcccaaggcctgactcaagcccaccactggccacgcaccttcctccagccatgatggaggcccagccacctcctgagtcctgagagttttaagtcttggagccctcagctaaaatcccctgggctctcatcatagttcactggagcaatgggctaagtttatgaggggggggggtggtgaagaaacatgatttattgagcacctactatgctgtgtgccaggcactgggctgggcgtttcacatctttttcttatctggttctcactggtcattgtgaggcagttccatagttcttattttactaatgagggaacagaaaggtcagataacttgcccaaggccacacagctaagaagtggcagaactgggatttgaactgaagtctgactgctaccaagctcccatctcttcctcctgtactttgcctagggaccaaaagctagggctgtaccaaacacagttttctgatgggaggaatacaggctttaaccttagggaggttgatttgcagctcagaccagaccagctctgccactcctggttatgtgattctaatcaaccctcagtttcctcacctgtgaaatgggagaaaccataatcctcaccccccagtctgtgagtatgtataaccagtgcttggcacagaacagactcaataaatagacgttcccctcccctcccgttgtacagctggagaaacttcgggccacagaggtgacaggtgtgcttgaagccctgggaggtgaaaggctcggcctggagtcttccccttccatgggactagaggttgggctagaactgggttgcagcccagagatggggaaagagggtctgctgcaaggttccaggggtccccttccctgagggctgggagagagaacttcccccagagcctgcagtgcccagcctgcgggccacagcagattgctggatgtaaggtgacctgggtgtcctggcaacatgggattaaactagactgcacacgaatgtgcacacatggaagctgatatctacacggctctacagagcactacatagctatacatagacacatcttacatacatatacatattcatatacatatcttgctacgtttacagtagaaaaaaaaaaagcaaggccctcaagggccctgtgtgtcccaaggaacttgggcgcaggaggctcctgggaacacactccagggcagcccccagcagagtgggctccaagttcacagccaaggaactgattgatggtaggtagctcttgctctacagaacaatacaatgacaggtctatgctaggacccaaacacgggtcaccccacccctgccctgtccccagagaccccgcctgtcttcctttggctgttgcctttgggccttgtctgctcccccctccctccctccctccctctctccctctagtgctgagtattaaaatagtctataaaagcaagtgaccaaaaatctatagctctaagaatacctggttattttctgctgtctttttgtttttctggggtatgtttttttatggttattattgttgttggtatatctcctaatcacagttaaacctgaaggaagaaaggagcaagaaaaagaagagggagggagggcccagctcataaattagacggcagtttggagcgtactggctcagacctagcgccaggttccctctggggtgcagcagtagtcagagggggccctccagaagaggcggctcttgccccaaacaaagaaagtgggggtggcaaagaacctgaggatgtcttccgaggcaaagtgacatgttggcctgggatggcaccatatggccttccaggaggcccaaggcccccactactcccactgccacccccagctctggggtagagtgagaaggcagccaccgactcccctgaggagtgaggcgaggccctgcggagagtctgtgccccatcctgggggagggctggctgagaggctgagatgagcttcaggtcctgtgtgaggcggccaggggtgaggggtggtgtgcccctgcgctgtgggacctggggaggtggagggctggatgcaggtggcaggagcagggaaccatgggagccagaggcccggggtggggcactcgggaaagttcttgggggccccgggctgtggcccggaggactgaggcctcctcggggggtaaaggctacaggagaagcccctccagaggcccctgccatgaaggatggtcgctcaggccgtgggggtgtctctggtgtacttgatggaccagctgccagacctagggacaactctccaggaggctggcccagctgcccagggctggatgatggtgacctggaggagggtgggggcggcaagaagtgctccaggagtcccagacctcctcgggccccaggcagtgggggtggtggctgggcagcctgtggagagcgagcgcctggttgcagtggggtgagcagcggggagtcagaggatgacagggagccacccagcgccttgtgaaagtggccgaacccagtggtggaggcggcggcggcagtggaggtggagggtgtgggggctggtggggaaccgcaggctcctggaggtggggaagagctagaggagggcaggagagggctcaatccaggaggtgcagagaatccagccagctgttggatgtggaaggaggatgaagacggtgtgtccacctgtgaggggctgctggcgggtgaagcagagcccagagctgaagggatcaaggactgcagcctccttgggtgcctcggtgtctgtccagccccaaggttgcccagcccaggtccgggagggggccggaagatggcggcgggcaggcgggggtggtgtgtgagggctatggccaccgaagtagtagcagcagcagcctgcagtggcgcctggatcagcggggtccatataacaggcgtgggggttggggtggctgaggcggcagcctggacgcggtgagcacagtgggccatctcacggtcatgccgcacgatctgctggatgatctcgttctcttggtagttgaagacgcctgagttgaggtcgtgctgcaccttgtggaggaggatggagttcttcttgcctatgcggtccaggcggtccagcgcaaccgtctcgaaggccctccgcatcatgggatactcctccagcacctcattgaagttgtccacgctcagtgagtagaggcggcaataagtatccgctctgacgctggctgtgcgccgaccccgggtcagcaagcagatctctccaaaataggagccatcagccagcttggtctctttgttgcccttagtgagcacgctgaccacgccgtgctggataaagtacatcttcttgccgatggtgccttcgcggatgatgtaatccccaggctggaagacctcgaaacgcaacttggtcagcatggatgtcacaaagttgggatctgcgttggcaaacagtggcatggatgccaccagctttcggcagttaaagttgatgatctcctctcgaagtggctcactcagctcacccaggatgctttcctcatcaaacatcttgccttggtagcggtgttcatagtagtcatggatgcgctgtcgggtgtcaggcgggagcttgtggaaggacatgtactgctccacctgtttatacttctcctggtactggcgccgggaggagtctagcgactggatgagggcagtggcgtggccgatgaacatggcatagcaggtggcccccacgatcatgctgagcatggtgagccagacgtcagacatgcctacgggtgcctgccgtccatacccaatgcacagcatgtggctcatggccttgaagagggcgtaggaatactgcttcccccaggagttattcaccatgccattgatggacacccagcagtcatgggggaagtcctgcagcatgggcactaggaactgcaggcagccatcccagtgacacagcagaagcatcatgccaatgaggttcacgatgcgtaccacggcgctggccaggtcataggtcatgtggaagatctcttcccactgatgaatgtatcgaatgaggcgggaaagcctcaagaggcgcaggaggctgaggatcttagtgaaacggacaatgcgcagagccctagcggttttgtagacctccgagtcaatgcgagtctccactataaggaagatgtagtcgacagggatggaggagatgaaatctaccacaaaccagcttttcaggtacttcatcttgatcctctgcgggtcaaggatgatttctgtgttgtcctccaccacgatccccgtgcggaagttgaggaccaagtcaatgaggaagaatgtgtctgacaccacattgaagacgatccagggtgtggtgttctcatccttgaagaaggtgatgcccacgggtatgatgatcagattccccaccatcagcaacagcatcgtcaggtcccagtaaaatctgaagtcactgtaggggtggataatccaaaaccctgctgacttaaccctctcctgctcgcgctccaccgctttctggctgccgaacatccttagggagaatttgttgaccccaggttgcagcatggcaccgaactggcgctgcatgaagccgctctggcccaggcgcacctcggcctcggggaggatctggtcgctggcggccgcgcctccctccactttgatagcggtgtccgccgagggctgctcgcaggaggcagaggccggctgcggcggctgctggggcggcggcgaggctgcgggttgtgccgcggtggccgggcgctcgggttcggtcgccaggcccgggggcgtcctgtcctcgccgggggacgcatcgccctcagcggcgatgagccgccgttcctccgcggagtcatgcaggtgcccgagactgctgccgccccctgctccaccactgccgccgccccggctgcccagcgaggccagactcccgcggaagcgcctgcagtcaccgttggtgctggacttgccggcgctgcggcccggcccctcgctctctgtcgccccgagggccgcaccccgggactccgagcagcccgcagccaccgagggagagggcgagggcagcggccgcagccggatgctccttcggctggggtcctggcggcccccggccccttcttcctcaccatcctcttcctcgtccatgatccacgccttggcccccacctgctgcggaaggctgtagagccgcttgcgcatggacggcggcagcttgtccatggtgccagggattgggccgggggcagcggtgcgggtgcggcacgggggacccgctccaggtgcgcctgccagtgaggacgcgtccttcgctgcctcacgagcccatgatcgcgcgggctgcgcgccgaggggaggctcctagtccggctgcaggtccccgggttcgccgcgctgcacctcctcccgggcccggcttgggcgcggggaccccacgctccctccctcttttccctccctcctgcgatcaggggcgcggcgcgcggcccggctccaggcgccccgcccccgcggggaacaatgggcgcgggcagcggcggcgctgcggccaccgcgctccgggaaccgctcccgagcgcagagcgcactgcccgcgcggttcccgggagtgcgtccggcgggtgtctggggctgtcagcgcgtgtgaccgcccgggctttgcagctggtcacccgggttctcgctttgcctcctctagctgagcccagccggccgagtcctggggactcccgccgcagcggagcggagcccagcggcccgccgggcttacatcagcctccgcctct

SEQ ID NO: 65 - RNA, 3947 nt, Rattus norvegicus
  source 1..3947: mol_type = mRNA
gagggagggaacgtggggtccccgcgcccaagcccggcccgggaggaggtgcagcgcggcgaacccggggacccgcagccggactaggagcctcccctcggcgcgcagccggcgagatcatgggctcgtgaggcagcgaaggacgagtcctccctggcaggcgcacctggagcgggtcccccgtgccgcacccgcaccgctgcccccggcccagtccctggcaccatggacaagctgccgccgtccatgcgcaagcggctctacagccttccgcagcaggtgggggccaaggcgtggatcatggacgaggaagaggatggtgaggaagagggggccgggggcctccaggacccaagccgaaggagcattcggctgcggccgctgccctcgccctcgccctcggtggccgccggctgctccgagtcccggggtgcggccctcggggcggcagacagcgaggggccgggccgcagcgccggcaagtccagcaccaacggtgactgcaggcgcttccgcgggagtctggcctcgctgggcagccggggcggcggcagtggtggagcagggggcggcagcagtctcgggcacctgcatgactccgcggaggagcggcggctcatcgccgctgagggcgatgcgtcccccggcgaggacaggacgcccccgggcctggcgaccgagcccgagcgcccgggcgccgcggcacaacccgcagcctcgccgccgccccaacagccgccgcagccggcctccgcctcctgcgagcagccctcggcggacacagctatcaaagtggaaggaggcgcggccgccagcgaccagatcctccctgaggccgaggtgcgcctgggccagagcggcttcatgcagcgccagttcggtgccatgctgcaacctggggtcaacaaattctcgctaaggatgttcggcagccagaaagcagtggagcgtgagcaggagagggttaagtcagctgggttttggattatccacccctacagcgacttcagattttactgggacctgacgatgctgttgctgatggtggggaatctgatcatcatccctgtgggcatcaccttcttcaaggatgagaacaccaccccctggatcgtcttcaacgtggtgtcagacacattcttcctcattgacttggtcctcaacttccgcacggggatcgtggtggaggacaacacagaaatcatccttgacccacagcggatcaagatgaagtacctgaaaagctggtttgtggtggacttcatctcctccatccccgtggactacatcttccttatagtggagactcgcattgactcggaggtctacaaaaccgccagggctctgcgcattgtccgcttcacgaagatcctcagcctcctgcgcctcctgcggctttcccgcctcattcggtacattcaccagtgggaagagatcttccacatgacctacgacctggccagtgccgtggtacgcatcgtgaacctcattggcatgatgcttctgctttgccactgggatggctgcctgcagttcctggtgcccatgctgcaggacttcccccatgactgctgggtgtccatcaacggcatggtgaataactcctgggggaagcagtactcctatgccctcttcaaggccatgagccacatgctgtgtattgggtacggacggcaggcacccgtaggcatgtctgacgtctggctcaccatgctcagcatgatcgtgggcgccacctgctatgccatgttcatcgggcacgccactgccctcatccagtcgctggactcctcccggcgccagtaccaggagaagtacaagcaggtggagcagtacatgtccttccacaagctcccgcctgacaccaggcagcgcatccacgactactacgaacaccgctaccagggcaagatgtttgacgaggaaagcatcctgggtgagctgagtgagccgcttcgagaggagatcatcaactttaactgccggaagctggtggcatccatgccactgttcgccaatgcagaccccaactttgtgacgtctatgctgaccaagttgcgttttgaggtctttcagcctggggactacatcatccgtgaaggcaccatcggcaagaagatgtactttatccagcacggcgtggtcagtgtgctcactaagggcaacaaggagaccaagctggctgatggctcctattttggagagatctgcttgctgacccgaggccgtcgcacagcgagcgtgagggcggatacttactgccgcctctactcactgagcgtggacaacttcaacgaggtgctggaggagtatcccatgatgcgcagggctttcgagacggttgcgctggaccgtctggaccgcataggcaagaagaactccatcctcctccacaaggtgcagcacgacctcaactcaggcgtcttcaactaccaagagaacgagatcatccagcagatcgtgcggcatgaccgtgagatggcccactgtgctcaccgcgtccaggctgctgcctcagccaccccaaccccaacgcctgtcatatggaccccactgatccaggcaccactgcaggctgctgctgctactacttcggtggccatagccctcacacaccacccccgcctgccagccgctatcttccggccccctcccggacctgggctgggtaacctgggggctggacagacaccgaggcacccaaggaggttgcagtccttgatcccttcagcgctaggctctgcttcaccagccagcagcccctcacaggtggacacaccgtcttcatcttccttccacatccaacagctggctggattctctgcacctcctggattgagtcctctcttgccctcctctagctcttccccacctccaggagcctgcagttctcccccagcccccactccatccacctccactgctgccaccaccaccgggttcggccactttcataaggcgctaggtggctccctgtcttcctctgattccccgctgctcaccccactgcaaccgggcgctcgctctccacaggctgcccagccgccacccccactgcctggggcccgaggaggcctgggactcctggagcacttcttgccgcccccaccttcgtcccggtcaccatcatctagccctgggcagctgggccagcctcctggagagttgtccccaggtctggcagctggtccaccaagtacaccagagacacccccgcggcccgaacggccatcctttatggcaggggcctctgggggggcttctcctgtagcctttaccccccgaggaggcctcagccctccgggccacagcccaggacccccaagaactttcccgagtgccccaccccgggcctctggctcccatggttccctgctcctgccacctgcatccagccctccgcctccccaggtcccacagcgcaggggcacaccacccctcacccccggccgcctcacacaggacctgaagctcatctcagcctctcagccagccctcccccaggatggggcacagactctacgcagggcctctcctcactcctcaggggagtcgatggctgccttctcactctaccccagagctgggggtggcagtgggagcagtgggggccttgggcctcctggaaggccatatggtgccatcccaggccagcatgtcactttgcctcggaagacatcctcaggttctttgccacccccactttctttgtttggggcaagagccgcctcttctggagggccccctctgactgctgcaccccagagggaacctggcgctaggtccgagccagtacgctccaaactgccgtctaatttatgagctgggccctccctccttccctcttctttttcttgctcccttcttccttcaggtttaactgtgattaggagatataccaataacaataataaccataaaaaacataccccagaaaaacaaaaaga

SEQ ID NO: 66 - RNA, 3947 nt, Rattus norvegicus
  source 1..3947: mol_type = mRNA
tctttttgtttttctggggtatgttttttatggttattattgttattggtatatctcctaatcacagttaaacctgaaggaagaagggagcaagaaaaagaagagggaaggagggagggcccagctcataaattagacggcagtttggagcgtactggctcggacctagcgccaggttccctctggggtgcagcagtcagagggggccctccagaagaggcggctcttgccccaaacaaagaaagtgggggtggcaaagaacctgaggatgtcttccgaggcaaagtgacatgctggcctgggatggcaccatatggccttccaggaggcccaaggcccccactgctcccactgccacccccagctctggggtagagtgagaaggcagccatcgactcccctgaggagtgaggagaggccctgcgtagagtctgtgccccatcctgggggagggctggctgagaggctgagatgagcttcaggtcctgtgtgaggcggccgggggtgaggggtggtgtgcccctgcgctgtgggacctggggaggcggagggctggatgcaggtggcaggagcagggaaccatgggagccagaggcccggggtggggcactcgggaaagttcttgggggtcctgggctgtggcccggagggctgaggcctcctcggggggtaaaggctacaggagaagcccccccagaggcccctgccataaaggatggccgttcgggccgcgggggtgtctctggtgtacttggtggaccagctgccagacctggggacaactctccaggaggctggcccagctgcccagggctagatgatggtgaccgggacgaaggtgggggcggcaagaagtgctccaggagtcccaggcctcctcgggccccaggcagtgggggtggcggctgggcagcctgtggagagcgagcgcccggttgcagtggggtgagcagcggggaatcagaggaagacagggagccacctagcgccttatgaaagtggccgaacccggtggtggtggcagcagtggaggtggatggagtgggggctgggggagaactgcaggctcctggaggtggggaagagctagaggagggcaagagaggactcaatccaggaggtgcagagaatccagccagctgttggatgtggaaggaagatgaagacggtgtgtccacctgtgaggggctgctggctggtgaagcagagcctagcgctgaagggatcaaggactgcaacctccttgggtgcctcggtgtctgtccagcccccaggttacccagcccaggtccgggagggggccggaagatagcggctggcaggcgggggtggtgtgtgagggctatggccaccgaagtagtagcagcagcagcctgcagtggtgcctggatcagtggggtccatatgacaggcgttggggttggggtggctgaggcagcagcctggacgcggtgagcacagtgggccatctcacggtcatgccgcacgatctgctggatgatctcgttctcttggtagttgaagacgcctgagttgaggtcgtgctgcaccttgtggaggaggatggagttcttcttgcctatgcggtccagacggtccagcgcaaccgtctcgaaagccctgcgcatcatgggatactcctccagcacctcgttgaagttgtccacgctcagtgagtagaggcggcagtaagtatccgccctcacgctcgctgtgcgacggcctcgggtcagcaagcagatctctccaaaataggagccatcagccagcttggtctccttgttgcccttagtgagcacactgaccacgccgtgctggataaagtacatcttcttgccgatggtgccttcacggatgatgtagtccccaggctgaaagacctcaaaacgcaacttggtcagcatagacgtcacaaagttggggtctgcattggcgaacagtggcatggatgccaccagcttccggcagttaaagttgatgatctcctctcgaagcggctcactcagctcacccaggatgctttcctcgtcaaacatcttgccctggtagcggtgttcgtagtagtcgtggatgcgctgcctggtgtcaggcgggagcttgtggaaggacatgtactgctccacctgcttgtacttctcctggtactggcgccgggaggagtccagcgactggatgagggcagtggcgtgcccgatgaacatggcatagcaggtggcgcccacgatcatgctgagcatggtgagccagacgtcagacatgcctacgggtgcctgccgtccgtacccaatacacagcatgtggctcatggccttgaagagggcataggagtactgcttcccccaggagttattcaccatgccgttgatggacacccagcagtcatgggggaagtcctgcagcatgggcaccaggaactgcaggcagccatcccagtggcaaagcagaagcatcatgccaatgaggttcacgatgcgtaccacggcactggccaggtcgtaggtcatgtggaagatctcttcccactggtgaatgtaccgaatgaggcgggaaagccgcaggaggcgcaggaggctgaggatcttcgtgaagcggacaatgcgcagagccctggcggttttgtagacctccgagtcaatgcgagtctccactataaggaagatgtagtccacggggatggaggagatgaagtccaccacaaaccagcttttcaggtacttcatcttgatccgctgtgggtcaaggatgatttctgtgttgtcctccaccacgatccccgtgcggaagttgaggaccaagtcaatgaggaagaatgtgtctgacaccacgttgaagacgatccagggggtggtgttctcatccttgaagaaggtgatgcccacagggatgatgatcagattccccaccatcagcaacagcatcgtcaggtcccagtaaaatctgaagtcgctgtaggggtggataatccaaaacccagctgacttaaccctctcctgctcacgctccactgctttctggctgccgaacatccttagcgagaatttgttgaccccaggttgcagcatggcaccgaactggcgctgcatgaagccgctctggcccaggcgcacctcggcctcagggaggatctggtcgctggcggccgcgcctccttccactttgatagctgtgtccgccgagggctgctcgcaggaggcggaggccggctgcggcggctgttggggcggcggcgaggctgcgggttgtgccgcggcgcccgggcgctcgggctcggtcgccaggcccgggggcgtcctgtcctcgccgggggacgcatcgccctcagcggcgatgagccgccgctcctccgcggagtcatgcaggtgcccgagactgctgccgccccctgctccaccactgccgccgccccggctgcccagcgaggccagactcccgcggaagcgcctgcagtcaccgttggtgctggacttgccggcgctgcggcccggcccctcgctgtctgccgccccgagggccgcaccccgggactcggagcagccggcggccaccgagggcgagggcgagggcagcggccgcagccgaatgctccttcggcttgggtcctggaggcccccggccccctcttcctcaccatcctcttcctcgtccatgatccacgccttggcccccacctgctgcggaaggctgtagagccgcttgcgcatggacggcggcagcttgtccatggtgccagggactgggccgggggcagcggtgcgggtgcggcacgggggacccgctccaggtgcgcctgccagggaggactcgtccttcgctgcctcacgagcccatgatctcgccggctgcgcgccgaggggaggctcctagtccggctgcgggtccccgggttcgccgcgctgcacctcctcccgggccgggcttgggcgcggggaccccacgttccctccctc

SEQ ID NO: 67 - RNA, 7196 nt, Macaca mulatta
  source 1..7196: mol_type = mRNA
ctgtggggcaaacatgccagggaaaggcgagcccagagcttggtgatggagaatttgggaagctaccccgcccccttcaatcttgggatggggaattcgcaactgaagccggagctctagacttggggcgcgcttccagcttggcccaagaaagagatttaagggcgcagcagtatggacacctctcaccccggctccgaaggtctagcgagggtctaaccccggcccctcgccaggcccgccccccgccccctcccagcccctggcccgtgcgccgctgcccctttaagaagcccaggtaggcaggcctggctgctggagccgctcctatggcaacccgcgtgctgcggcggcttcatgaatattccggggcgcgggagcccaagcgcggccggagggcgctccgggggaggcggccgctgatgtaagcccggcgggtcgctgggctccgcttggctgcggcgggagccccgggacgggccagaggggccgggccagaggaggcgagacgaggtcgcggggggccagccacaaagtccgggcggcgagacagacggacagccagccctcccgcgggacgcacgctcgggacccgcgcgggccgtgagctctgcgctccggagcggttccccgagcgcagcggccgcagagcctctccagccggcgcccattgttccccgcgggggcggggcgcctggagccgggccgcgcgccgcgcccctgaacgccagagggagggagggaggcaaggaggtagcgcggggtccgagcgcccagcccggcccgggaggaggcgcagcgcggcgagcccggggactcggagcgcaactgggagcctcccagcggcgcgcagcctgcccgagtatgggcgcctgaggcggccccacgcgggcggcgaaggacgagtccccacgggcggactgaccggcgggcggacctggagcccgtccgcggcgccgcgcccctacccccggctcggtccggcccctggcgccatggacaagctgccaccgtccatgcgcaagcggctctacagcctcccgcagcaggtgggggccaaggcgtggatcatggacgaggaagaggacgccgaggaggagggggccgggggccgccaagaccccagccgcaggagcatccggctgcggccactgccctcgccctcgccctcggcggccgcgggtggcacggagtcccggagctcggccctcggggcagcggacagcgaagggtcggcccgcggcgcgggcaagtccagcacgaacggcgactgcaggcgcttccgcgggagcctggcctcgctgggcagccggggcggcggcggcggcggcacggggagcggcagcagtcacggacacctgcatgactccgcggaggagcggcggctcatcgccgagggcgacgcgtcccccggcgaggacaggacgcccccaggcctggcggccgagcccgagcgccccggcgcctcggcgcagcccgcagcctcgccgccgccgccccagcagccaccgcagccggcctcctcctcctgcgagcagccctcggcggacaccgctatcaaagtggagggaggcgcggccaccggcgaccagatccttccggaggccgaggtgcgcttgggccagtccggcttcatgcagcgccagttcggggccatgctccaacccggggtcaacaaattctccctaaggatgttcggcagccagaaagccgtggaacgcgagcaggagagggtcaagtcggccggattttggattatccacccctacagtgacttcagattttactgggacctgaccatgctgctgctgatggtgggaaacctgatcatcattcctgtgggcatcaccttcttcaaggatgagaacaccacaccctggattgtcttcaacgtggtgtcagacacattcttcctcatcgacttggtcctcaacttccgcacagggatcgtggtggaggacaacacagagatcatcctggacccacagcggattaaaatgaagtacctgaaaagctggttcatggtagatttcatttcctccatccccgtggactacatcttcctcattgtggagacacgcatcgactcggaggtctacaagactgcccgggccctgcgcatcgtccgcttcacgaagatcctcagcctcttacgcttgttacgcctctcccgcctcattcggtatattcaccagtgggaagagatcttccacatgacctacgacctggccagtgccgtggtgcgcatcgtgaacctcatcggcatgatgctcctgctctgccactgggatggctgcctgcagttcctggtacccatgctgcaggactttcctgatgactgctgggtgtccatcaacaacatggtgaacaactcctgggggaagcagtactcctacgcgctcttcaaggccatgagccacatgctgtgcatcggctacggacggcaggcgcccgtgggcatgtccgacgtctggctcaccatgctcagcatgatcgtgggcgccacctgctacgccatgttcattggccacgccactgccctcatccagtccctggactcctcccggcgccagtaccaggaaaagtataagcaggtggagcagtacatgtccttccacaagctcccgcccgacacccggcagcgcatccacgactactacgagcaccgctaccagggcaagatgttcgacgaggagagcattctgggcgagctgagcgagcccctgcgggaggagatcatcaactttaactgccggaagctggtggcctccatgccactgtttgccaacgcggaccccaacttcgtgacgtccatgctgaccaagctgcgtttcgaggtcttccagcccggggactacatcatccgggaaggcaccatcggcaagaagatgtacttcatccagcacggcgtggtcagcgtgctcaccaagggcaacaaggagaccaagctggccgacggctcctactttggagagatctgcctgctgacacggggccggcgcacagctagcgtgagggccgacacctactgccgcctctactcgctgagcgtggacaacttcaatgaggtgctggaggagtaccccatgatgcgaagggcctttgagactgtggcgctggaccgcctggaccgcatcggcaagaagaactccatcctcctccacaaagtccagcacgacctcaactcgggcgtcttcaactaccaggagaacgagatcatccagcagattgtgcagcatgaccgggagatggcacactgcgcacaccgcgtccaggccgccgcctctgccaccccaacccccacgcctgtcatctggaccccgctgatccaggcaccactgcaggctgccgcggccaccacttctgtggccatagccctcacccaccaccctcgcctgcctgctgccatcttccgccctcccccaggatctgggctgggcaacctcggtgccgggcagacgccaaggcacctgaaacggctgcagtccctgatcccttctgcgctgggctccgcctcgcccgccagcagcccatcccaggtagacacgccgtcttcatcctccttccacatccaacagctggctggattctctgcccccgccggactgagcccactcctgccctcatccagctcctccccaccccccggggcctgcggctccccctcggctcccataccatcagctggcacagccgccaccaccacagccgggtttggccacttccacaaggcactgggcggctccctgtcctcctccgactctcccctgctcaccccgctgcagccaggcgcccgctccccgcaggctgcccagccacctccggcaccacccggggcccggggaggcctgggactcccggagcacttcttgccacccccaccctcatccagatccccatcatctagccctgggcagctgggccagcctcccggggagttgtccctaggtctggctgctggcccaccgagcacgccagagacacccccacggcagcctgagccgccatcccttgtggcaggggcctctgggggggcttcccctgtaggctttactccccgaggaggtctcagcccccccggccacagcccaggccccccaagaaccttcccaagtgccccaccccgggcctctggctcccacggatccttgcttctgccacctgcatccagccccccaccaccccaggtcccccagcgccggggcacgccccccctcacccccggccgcctcacccaggacctcaagctcatctctgcatctcagccagccctgcctcaggacggggcacagactctccgcagagcctccccgcactcctcaggggagtccatggctgccttcccgctcttccccagggctgggggtggcagcgggggcagtgggagcagcgggggccttggtccccctgggaggccctatggtgccatccccggccagcacgtcactctgcctcggaagacatcctcaggttctttgccaccccctctgtctttgtttggggcaagagccacctcttctggggggccccctctgactgctggaccccagagggaacctggggccaggcctgagccagtgcgctccaaactgccgtccaatctatgagctgggcccttccctcttctttcttcttttctctccgttccttcttccttcaggtttaactgtgattaggagatataccaataacagtaataattatttaaaaaaccacacacaccagaaaatcaaaagacagcagaaaataaccaggtattcttagagctatagatttttggtcacttgcttttatagactattttaatactcagcactagagggagggagggggagggaggagggagcaggcaggtcccaaatgcaaaagccagagaaaggcagatggggtctcggggctgggcaggggtcggggtggccagtgttgggggttcttagagcagatgtgtcattgtgttcatttagagaaacagctgccatcagccccttagctgtaagttggagctccactctgcccccaggaaggggctgccccggggcgtgccctggggggcctcagatgcctgcgaccttgggagaaaagggccagggccctgagggcctagcatttttttctactgtaaacgtagcaagatctgtatatgaatatatgtatatgtatgtaagatgtgtatatgtatagctatgtagcgctctgtagagccatgtagatagccactcgtgcgcacacgtgtgtggtctagtttattcccatgttgccaggatgcccaggtcaccttacacccagcaacccaccttggcccgcaggccgtgcactgcatggtctagggatgttctctctccagtcctcagggaagaggaccccaggacttcgcagcaggccccctctctcgtctcagatccagtcccagcctgacctctcaccacacggaagtggaagactcctttcctagggcctcaggcacaccccgccacccctggagtcatcagtttgcccatctgtacagcgggaggtgaggggaacttctgtgtattgagtctgctctgtggcaagcactgctttcgcactttacacacgttcactccctcagtttcacaaagaccatggggtggccactttcattctccccatttagcagatgaagaaacagttctgggtaatttctccaccatcatgtaactcggaatggcagagtggggactgatttgaggttcaaattcacgcctgcttgaggcccaagtctgtgttccttccatcagaaaactgttgaggggggctgaggtagatggtccccaagcgtggtgcagaaggaagacaccagattttggcagcagtcaggcctgggtttgaatcccagccctgccacttcttacctgtatgatcttgggcaagttctctgacttttctgtcacctcatttgtaaaatgggaatcattatggtaccgcctcacaaggacctatgaggaccagatgcgaaaaatctatatgtgaaatgcccagcccagcgcctggcacataccatggtaggtgctcaataaatcacatttcttctggccctcatatgcccagcctattgctccagcaagctatgtgagagcccagggagctttggctgagggctccaagacttaaaatctcaggactcaggaggtggctgggcctccctaagggcccaaggaaggtgtgtggccagaggtgggggggagccaggccttgagatgtgggaagacttcaacagggagagagggagggaatggtgggtgggatggagtatatagcggggagattcctgaggtggagtggtggattagggctttgggagggaatccgcaggctgaggggtcagagggatggccttgggtgataggctaagggcttgactgggcttggtcctggcaactaggagccataagcaagttccagattgcaggaacgagaaagcagctcagatgcctttggaggcaccatcctccctcctcccagatgggatctgccagaggcaaagccaggggtctgcccctgcctatagggccagagcaggtatagctgcaatccccaaataatgagatgggctggccccacattatccatccagaacattccatgcttcaagccagaatgttggcaagatcgggttttgtcttgagctatcctgggatgtgggaaaaaccgatttctccatagatgggctgcagggagtgggaggcagtattccaggagagaagtgggtgaaggttcctgggatcttaggtaaagactagatgccgcctggtactggtctgtactgtgctggctcaggagttctgagaactggaaggacttagcctcaacctgagttctgcacgcaccccttccccttaaggaaggcagctctgagaggcagcaggacttgatccaaacccacagtcttgtcctggaggtagcaggggtgaaggtggagggtccagggccgtgaggaggctgcttgccatcagagcctggcctgaccaccctcttctctacttacacacacatgtattttataacagccctgacccaacctggccactctgcagagactgggacagccaggtgcaggcagggggccctcccaaacccagtcacctacaaggaattttcaaatcttccacttttaaaacagaaaccggtaaatgcgccgtattgtatattttatttaaataaaaaaaattccagca

SEQ ID NO: 68 - RNA, 7196 nt, Macaca mulatta
  source 1..7196: mol_type = mRNA
tgctggaattttttttatttaaataaaatatacaatacggcgcatttaccggtttctgttttaaaagtggaagatttgaaaattccttgtaggtgactgggtttgggagggccccctgcctgcacctggctgtcccagtctctgcagagtggccaggttgggtcagggctgttataaaatacatgtgtgtgtaagtagagaagagggtggtcaggccaggctctgatggcaagcagcctcctcacggccctggaccctccaccttcacccctgctacctccaggacaagactgtgggtttggatcaagtcctgctgcctctcagagctgccttccttaaggggaaggggtgcgtgcagaactcaggttgaggctaagtccttccagttctcagaactcctgagccagcacagtacagaccagtaccaggcggcatctagtctttacctaagatcccaggaaccttcacccacttctctcctggaatactgcctcccactccctgcagcccatctatggagaaatcggtttttcccacatcccaggatagctcaagacaaaacccgatcttgccaacattctggcttgaagcatggaatgttctggatggataatgtggggccagcccatctcattatttggggattgcagctatacctgctctggccctataggcaggggcagacccctggctttgcctctggcagatcccatctgggaggagggaggatggtgcctccaaaggcatctgagctgctttctcgttcctgcaatctggaacttgcttatggctcctagttgccaggaccaagcccagtcaagcccttagcctatcacccaaggccatccctctgacccctcagcctgcggattccctcccaaagccctaatccaccactccacctcaggaatctccccgctatatactccatcccacccaccattccctccctctctccctgttgaagtcttcccacatctcaaggcctggctcccccccacctctggccacacaccttccttgggcccttagggaggcccagccacctcctgagtcctgagattttaagtcttggagccctcagccaaagctccctgggctctcacatagcttgctggagcaataggctgggcatatgagggccagaagaaatgtgatttattgagcacctaccatggtatgtgccaggcgctgggctgggcatttcacatatagatttttcgcatctggtcctcataggtccttgtgaggcggtaccataatgattcccattttacaaatgaggtgacagaaaagtcagagaacttgcccaagatcatacaggtaagaagtggcagggctgggattcaaacccaggcctgactgctgccaaaatctggtgtcttccttctgcaccacgcttggggaccatctacctcagcccccctcaacagttttctgatggaaggaacacagacttgggcctcaagcaggcgtgaatttgaacctcaaatcagtccccactctgccattccgagttacatgatggtggagaaattacccagaactgtttcttcatctgctaaatggggagaatgaaagtggccaccccatggtctttgtgaaactgagggagtgaacgtgtgtaaagtgcgaaagcagtgcttgccacagagcagactcaatacacagaagttcccctcacctcccgctgtacagatgggcaaactgatgactccaggggtggcggggtgtgcctgaggccctaggaaaggagtcttccacttccgtgtggtgagaggtcaggctgggactggatctgagacgagagagggggcctgctgcgaagtcctggggtcctcttccctgaggactggagagagaacatccctagaccatgcagtgcacggcctgcgggccaaggtgggttgctgggtgtaaggtgacctgggcatcctggcaacatgggaataaactagaccacacacgtgtgcgcacgagtggctatctacatggctctacagagcgctacatagctatacatatacacatcttacatacatatacatatattcatatacagatcttgctacgtttacagtagaaaaaaatgctaggccctcagggccctggcccttttctcccaaggtcgcaggcatctgaggccccccagggcacgccccggggcagccccttcctgggggcagagtggagctccaacttacagctaaggggctgatggcagctgtttctctaaatgaacacaatgacacatctgctctaagaacccccaacactggccaccccgacccctgcccagccccgagaccccatctgcctttctctggcttttgcatttgggacctgcctgctccctcctccctccccctccctccctctagtgctgagtattaaaatagtctataaaagcaagtgaccaaaaatctatagctctaagaatacctggttattttctgctgtcttttgattttctggtgtgtgtggttttttaaataattattactgttattggtatatctcctaatcacagttaaacctgaaggaagaaggaacggagagaaaagaagaaagaagagggaagggcccagctcatagattggacggcagtttggagcgcactggctcaggcctggccccaggttccctctggggtccagcagtcagagggggccccccagaagaggtggctcttgccccaaacaaagacagagggggtggcaaagaacctgaggatgtcttccgaggcagagtgacgtgctggccggggatggcaccatagggcctcccagggggaccaaggcccccgctgctcccactgcccccgctgccacccccagccctggggaagagcgggaaggcagccatggactcccctgaggagtgcggggaggctctgcggagagtctgtgccccgtcctgaggcagggctggctgagatgcagagatgagcttgaggtcctgggtgaggcggccgggggtgagggggggcgtgccccggcgctgggggacctggggtggtggggggctggatgcaggtggcagaagcaaggatccgtgggagccagaggcccggggtggggcacttgggaaggttcttggggggcctgggctgtggccgggggggctgagacctcctcggggagtaaagcctacaggggaagcccccccagaggcccctgccacaagggatggcggctcaggctgccgtgggggtgtctctggcgtgctcggtgggccagcagccagacctagggacaactccccgggaggctggcccagctgcccagggctagatgatggggatctggatgagggtgggggtggcaagaagtgctccgggagtcccaggcctccccgggccccgggtggtgccggaggtggctgggcagcctgcggggagcgggcgcctggctgcagcggggtgagcaggggagagtcggaggaggacagggagccgcccagtgccttgtggaagtggccaaacccggctgtggtggtggcggctgtgccagctgatggtatgggagccgagggggagccgcaggccccggggggtggggaggagctggatgagggcaggagtgggctcagtccggcgggggcagagaatccagccagctgttggatgtggaaggaggatgaagacggcgtgtctacctgggatgggctgctggcgggcgaggcggagcccagcgcagaagggatcagggactgcagccgtttcaggtgccttggcgtctgcccggcaccgaggttgcccagcccagatcctgggggagggcggaagatggcagcaggcaggcgagggtggtgggtgagggctatggccacagaagtggtggccgcggcagcctgcagtggtgcctggatcagcggggtccagatgacaggcgtgggggttggggtggcagaggcggcggcctggacgcggtgtgcgcagtgtgccatctcccggtcatgctgcacaatctgctggatgatctcgttctcctggtagttgaagacgcccgagttgaggtcgtgctggactttgtggaggaggatggagttcttcttgccgatgcggtccaggcggtccagcgccacagtctcaaaggcccttcgcatcatggggtactcctccagcacctcattgaagttgtccacgctcagcgagtagaggcggcagtaggtgtcggccctcacgctagctgtgcgccggccccgtgtcagcaggcagatctctccaaagtaggagccgtcggccagcttggtctccttgttgcccttggtgagcacgctgaccacgccgtgctggatgaagtacatcttcttgccgatggtgccttcccggatgatgtagtccccgggctggaagacctcgaaacgcagcttggtcagcatggacgtcacgaagttggggtccgcgttggcaaacagtggcatggaggccaccagcttccggcagttaaagttgatgatctcctcccgcaggggctcgctcagctcgcccagaatgctctcctcgtcgaacatcttgccctggtagcggtgctcgtagtagtcgtggatgcgctgccgggtgtcgggcgggagcttgtggaaggacatgtactgctccacctgcttatacttttcctggtactggcgccgggaggagtccagggactggatgagggcagtggcgtggccaatgaacatggcgtagcaggtggcgcccacgatcatgctgagcatggtgagccagacgtcggacatgcccacgggcgcctgccgtccgtagccgatgcacagcatgtggctcatggccttgaagagcgcgtaggagtactgcttcccccaggagttgttcaccatgttgttgatggacacccagcagtcatcaggaaagtcctgcagcatgggtaccaggaactgcaggcagccatcccagtggcagagcaggagcatcatgccgatgaggttcacgatgcgcaccacggcactggccaggtcgtaggtcatgtggaagatctcttcccactggtgaatataccgaatgaggcgggagaggcgtaacaagcgtaagaggctgaggatcttcgtgaagcggacgatgcgcagggcccgggcagtcttgtagacctccgagtcgatgcgtgtctccacaatgaggaagatgtagtccacggggatggaggaaatgaaatctaccatgaaccagcttttcaggtacttcattttaatccgctgtgggtccaggatgatctctgtgttgtcctccaccacgatccctgtgcggaagttgaggaccaagtcgatgaggaagaatgtgtctgacaccacgttgaagacaatccagggtgtggtgttctcatccttgaagaaggtgatgcccacaggaatgatgatcaggtttcccaccatcagcagcagcatggtcaggtcccagtaaaatctgaagtcactgtaggggtggataatccaaaatccggccgacttgaccctctcctgctcgcgttccacggctttctggctgccgaacatccttagggagaatttgttgaccccgggttggagcatggccccgaactggcgctgcatgaagccggactggcccaagcgcacctcggcctccggaaggatctggtcgccggtggccgcgcctccctccactttgatagcggtgtccgccgagggctgctcgcaggaggaggaggccggctgcggtggctgctggggcggcggcggcgaggctgcgggctgcgccgaggcgccggggcgctcgggctcggccgccaggcctgggggcgtcctgtcctcgccgggggacgcgtcgccctcggcgatgagccgccgctcctccgcggagtcatgcaggtgtccgtgactgctgccgctccccgtgccgccgccgccgccgccccggctgcccagcgaggccaggctcccgcggaagcgcctgcagtcgccgttcgtgctggacttgcccgcgccgcgggccgacccttcgctgtccgctgccccgagggccgagctccgggactccgtgccacccgcggccgccgagggcgagggcgagggcagtggccgcagccggatgctcctgcggctggggtcttggcggcccccggccccctcctcctcggcgtcctcttcctcgtccatgatccacgccttggcccccacctgctgcgggaggctgtagagccgcttgcgcatggacggtggcagcttgtccatggcgccaggggccggaccgagccgggggtaggggcgcggcgccgcggacgggctccaggtccgcccgccggtcagtccgcccgtggggactcgtccttcgccgcccgcgtggggccgcctcaggcgcccatactcgggcaggctgcgcgccgctgggaggctcccagttgcgctccgagtccccgggctcgccgcgctgcgcctcctcccgggccgggctgggcgctcggaccccgcgctacctccttgcctccctccctccctctggcgttcaggggcgcggcgcgcggcccggctccaggcgccccgcccccgcggggaacaatgggcgccggctggagaggctctgcggccgctgcgctcggggaaccgctccggagcgcagagctcacggcccgcgcgggtcccgagcgtgcgtcccgcgggagggctggctgtccgtctgtctcgccgcccggactttgtggctggccccccgcgacctcgtctcgcctcctctggcccggcccctctggcccgtcccggggctcccgccgcagccaagcggagcccagcgacccgccgggcttacatcagcggccgcctcccccggagcgccctccggccgcgcttgggctcccgcgccccggaatattcatgaagccgccgcagcacgcgggttgccataggagcggctccagcagccaggcctgcctacctgggcttcttaaaggggcagcggcgcacgggccaggggctgggagggggcggggggcgggcctggcgaggggccggggttagaccctcgctagaccttcggagccggggtgagaggtgtccatactgctgcgcccttaaatctctttcttgggccaagctggaagcgcgccccaagtctagagctccggcttcagttgcgaattccccatcccaagattgaagggggcggggtagcttcccaaattctccatcaccaagctctgggctcgcctttccctggcatgtttgccccacag

SEQ ID NO: 69 - RNA, 6881 nt, Macaca fascicularis
  source 1..6881: mol_type = mRNA
tggagccgctcctatggcaacccgcgtgctgcggcggcttcatgaatattccggggcgcgggagcccgagcgcggccggagggcgctccgggggaggcggccgctgatgtaagcccggcgggtcgctgggctccgcttggctgcggcgggagccccgggacgggccagaggggccgggccagaggaggcgagacgaggtcgcggggggccagccacaaagtccgggcggcgagacagacggacagccagccctcccgcgggacgcacgcccgggacccgcgcgggccgtgcgctctgcgctccggagcggttccccgagcgccgcggccgcagagcctctccagccggcgcccattgttccccgcgggggcggggcgcctggagccgggccgcgcgccgcgcccctgaacgccagagggagggagggaggcaaggaggtagcgcggggtccgagcgcccagcccggcccgggaggaggcgcagcgcggcgagcccggggactcggagcgcaactgggagcctcccagcggcgcgcagcctgcccgagtatgggcgcctgaggcggccccacgccggcggcgaaggacgagtccccacgggcggactgaccggcgggcggacctggagcccgtccgcggcgccgcgcccctacccccggctcggtccggcccctggcgccatggacaagctgccaccgtccatgcgcaagcggctctacagcctcccgcagcaggtgggggccaaggcgtggatcatggacgaggaagaggacgccgaggaggagggggccgggggccgccaagaccccagccgcaggagcatccggctgcggccactgccctcgccctcgccctcggcggccgcgggtggcacggagtcccggagctcggccctcggggcagcggacagcgaagggtcggcccgcggggcgggcaagtccagcacgaacggcgactgcaggcgcttccgcgggagcctggcctcgctgggcagccggggcggnnnnnnnnnnnnnncggggagcggcagcagtcacggacacctgcatgactccgcggaggagcggcggctcatcgccgagggcgacgcgtcccccggcgaggacaggacgcccccaggcctggcggccgagcccgagcgccccggcgcctcggcgcagcccgcagcctcgccgccgccgccccagcagccaccgcagccggcctcctcctcctgcgagcagccctcggcggacaccgctatcaaagtggagggaggcgcggccaccggcgaccagatccttccggaggccgaggtgcgcttgggccagtccggcttcatgcagcgccagttcggggccatgctccaacccggggtcaacaaattctccctaaggatgttcggcagccagaaagccgtggaacgcgagcaggagagggtcaagtcggccggattttggattatccacccctacagtgacttcagattttactgggacctgaccatgctgctgctgatggtgggaaacctgatcatcattcctgtgggcatcaccttcttcaaggatgagaacaccacaccctggattgtcttcaatgtggtgtcagacacattcttcctcatcgacttggtcctcaacttccgcacagggatcgtggtggaggacaacacagagatcatcctggacccacagcggattaaaatgaagtacctgaaaagctggttcatggtagatttcatttcctccatccctgtggactacatcttcctcattgtggagacacgcatcgactcggaggtctacaagactgcccgggccctgcgcatcgtccgcttcacgaagatcctcagcctcttacgcttgttacgcctctcccgcctcattcggtatattcaccagtgggaagagatcttccacatgacctacgacctggccagtgccgtggtgcgcatcgtgaacctcatcggcatgatgctcctgctctgccactgggatggctgcctgcagttcctggtacccatgctgcaggactttcctgatgactgctgggtgtccatcaacaacatggtgaacaactcctgggggaagcagtactcctacgcgctcttcaaggccatgagccacatgctgtgcatcggctacggacggcaggcgcccgtgggcatgtccgacgtctggctcaccatgctcagcatgatcgtgggcgccacctgctacgccatgttcattggccacgccactgccctcatccagtccctggactcctcccggcgccagtaccaggaaaagtataagcaggtggagcagtacatgtccttccacaagctcccgcccgacacccggcagcgcatccacgactactacgagcaccgctaccagggcaagatgttcgacgaggagagcattctgggcgagctgagcgagcccctgcgggaggagatcatcaactttaactgccggaagctggtggcctccatgccactgtttgccaacgcggaccccaacttcgtgacgtccatgctgaccaagctgcgtttcgaggtcttccagcccggggactacatcatccgggaaggcaccatcggcaagaagatgtacttcatccagcacggcgtggtcagcgtgctcaccaagggcaacaaggagaccaagctggccgacggctcctactttggagagatctgcctgctgacacggggccggcgcacagctagcgtgagggccgacacctactgccgcctctactcgctgagcgtggacaacttcaatgaggtgctggaggagtaccccatgatgcgaagggcctttgagactgtggcgctggaccgcctggaccgcatcggcaagaagaactccatcctcctccacaaagtccagcacgacctcaactcgggcgtcttcaactaccaggagaacgagatcatccagcagattgtgcagcatgaccgggagatggcacactgcgcacaccgcgtccaggccgccgcctctgccaccccaacccccacgcctgtcatctggaccccgctgatccaggcaccactgcaggctgccgcggccaccacttctgtggccatagccctcacccaccaccctcgcctgcctgctgccatcttccgccctcccccaggatctgggctgggcaacctcggcgccgggcagacgccaaggcacctgaaacggctgcagtccctgatcccttctgcgctgggctccgcctcgcccgccagcagcccatcccaggtagacacgccgtcttcatcctccttccacatccaacagctggctggattctctgcccccgccggactgagcccactcctgccctcatccagctcctccccaccccccggggcctgcggctccccctcggctcccataccatcagctggcacagccgccaccaccacagccgggtttggccacttccacaaggcactgggcggctccctgtcctcctccgactctcccctgctcaccccgctgcagccaggcgcccgctccccgcaggctgcccagccacctccggcaccacccggggcccggggaggcctgggactcccggagcacttcttgccacccccaccctcatccagatccccatcatctagccctgggcagctgggccagcctcctggggagttgtccctaggtctggctgctggcccacccagcacgccagagacacccccacggcagcctgagccgccatcccttgtggcaggggcctctgggggggcttcccctgtaggctttactccccgaggaggtctcagcccccccggccacagcccaggccccccaagaaccttcccaagtgccccaccccgggcctctggctcccacggatccttgcttctgccacctgcatccagccccccaccaccccaggtcccccagcgccggggcacgccccccctcacccccggccgcctcacccaggacctcaagctcatctctgcatctcagccagccctgcctcaggacggggcacagactctccgcagagcctccccgcactcctcaggggagtccatggctgccttcccgctcttccccagggctgggggtggcagcgggggcagtgggagcagcgggggccttggtccccctgggaggccctatggtgccatccccggccagcacgtcactttgcctcggaagacatcctcaggttctttgccaccccctctgtctttgtttggggcaagagccacctcttctggggggccccctctgactgctggaccccagagggaacctggggccaggcctgagccagtgcgctccaaactgccgtccaatctatgagctgggcccttccctcttctttcttcttttctctccgttccttcttccttcaggtttaactgtgattaggagatataccaataacagtaataattatttaaaaaaccacacacaccagaaaatcaaaagacagcagaaaataaccaggtattcttagagctatagatttttggtcacttgcttttatagactattttaatactcagcactagagggagggagggggagggaggagggagcaggcaggtcccaaatgcaaaagccagagaaaggcagatggggtctcggggctgggcaggggtcggggtggccagtgttgggggttcttagagcagatgtgtcattgtgttcatttagagaaacagctgccatcagccccttagctgtaagttggagctccactctgcccccaggaaggggctgccccggggcgtgccctggggggcctcagatgcctgcgaccttgggagaaaagggccagggccctgagggcctagcatttttttctactgtaaacgtagcaagatctgtatatgaatatatgtatatgtatgtaagatgtgtatatgtatagctatgtagcgctctgtagagccatgtagatagccactcgtgcgcacacgtgtgtggtctagtttattcccatgttgccaggatgcccaggtcaccttacacccagcaacccaccttggcccgcaggccgtgcactgcatggtctagggatgttctctctccagtcctcagggaagaggaccccaggacttcgcagcaggccccctctctcatctcagatccagtcccagcctgacctctcaccacacggaagtggaagactcctttcctagggcctcaggcacaccccgccacccctggagtcatcagtttgcccatctgtacagcgggaggtgaggggaacttctgtgtattgagtctgctctgtggcaagcactgctttcgcactttacacacgttcactccctcagtttcacaaagaccatggggtggccactttcattctccccatttagcagatgaagaaacagttctgggtaatttctccaccatcatgtaactcggaatggcagagtggggactgatttgaggttcaaattcacgcctgcttgaggcccaagtctgtgttccttccatcagaaaactgttgaggggggctgaggtagatggtccccaagcgtggtgtagaaggaagacaccagattttggcagcagtcaggcctgggtttgaatcccagccctgccacttcttacctgtatgatcttgggcaagttctctgacttttctgtcacctcatttgtaaaatgggaatcattatggtaccgcctcacaaggacctatgaggaccagatgagaaaaatctatatgtgaaatgcccagcccagcgcctggcacataccatggtaggtgctcaataaatcacatttcttctgcccctcatatgcccagcctattgctccagcaaactatgtgagagcccagggagctttggctgagggctccaagacttaaaatctcaggactcaggaggtggctgggcctccctaagggcccaaggaaggtgtgtggccagaggtgggtgggagccaggccttgagatgtgggaagacttcaacagggagagagggagggaatggtgggtgggatggagtatatagcggggagattcctgaggtggagtggtggattagggctttgggagggaatccgcaggctgaggggtcagagggatggccttgggtgataggctaagggcttgactgggcttggtcctggcaactaggagccataagcaagttccagattgcaggaacgagaaagcagctcagatgcctttggaggcaccatcctccctcctcccagatgggatcctgccagaggcaaagccaggggtctgcccctgcctatagggccagagcaggtatagctgcaatccccaaataatgagatgggctggccccacattatccatccagaacattccatgcttcaagccagaatgttggcaagatcgggttttgccttgagctatcctgggatgtgggaaaaaccgatttctccatagatgggctgcagggagtgggaggcagtattccaggagagaagtgggtgaaggttcctgggatcttaggtaaagactagatgccgcctggtactggtctgtactgtgctggctcaggagttctgagaactggaaggacttagcctcaacctgagttctgcacgcaccccttccccttaaggaaggcagctctgagaggcagcaggacttgatccaaacccacagtcttgtcctggaggtagcaggggtgaaggtggagggtccagggccgtgaggaggctgcttgccatcagagcctggcctgaccaccctcttctctacttacacacacatgtattttataacagccctgacccaacctggccactctgcagagactgggacagccaggtgcaggcagggggccctcccaaacccagtcacctacaaggaattttcaaatcttccacttttaaaacagaaaccggtaaatgcgccgtattgtatattttatttaaataaaaaaaattccagca

SEQ ID NO: 70 - RNA, 6881 nt, Macaca fascicularis
  source 1..6881: mol_type = mRNA
tgctggaattttttttatttaaataaaatatacaatacggcgcatttaccggtttctgttttaaaagtggaagatttgaaaattccttgtaggtgactgggtttgggagggccccctgcctgcacctggctgtcccagtctctgcagagtggccaggttgggtcagggctgttataaaatacatgtgtgtgtaagtagagaagagggtggtcaggccaggctctgatggcaagcagcctcctcacggccctggaccctccaccttcacccctgctacctccaggacaagactgtgggtttggatcaagtcctgctgcctctcagagctgccttccttaaggggaaggggtgcgtgcagaactcaggttgaggctaagtccttccagttctcagaactcctgagccagcacagtacagaccagtaccaggcggcatctagtctttacctaagatcccaggaaccttcacccacttctctcctggaatactgcctcccactccctgcagcccatctatggagaaatcggtttttcccacatcccaggatagctcaaggcaaaacccgatcttgccaacattctggcttgaagcatggaatgttctggatggataatgtggggccagcccatctcattatttggggattgcagctatacctgctctggccctataggcaggggcagacccctggctttgcctctggcaggatcccatctgggaggagggaggatggtgcctccaaaggcatctgagctgctttctcgttcctgcaatctggaacttgcttatggctcctagttgccaggaccaagcccagtcaagcccttagcctatcacccaaggccatccctctgacccctcagcctgcggattccctcccaaagccctaatccaccactccacctcaggaatctccccgctatatactccatcccacccaccattccctccctctctccctgttgaagtcttcccacatctcaaggcctggctcccacccacctctggccacacaccttccttgggcccttagggaggcccagccacctcctgagtcctgagattttaagtcttggagccctcagccaaagctccctgggctctcacatagtttgctggagcaataggctgggcatatgaggggcagaagaaatgtgatttattgagcacctaccatggtatgtgccaggcgctgggctgggcatttcacatatagatttttctcatctggtcctcataggtccttgtgaggcggtaccataatgattcccattttacaaatgaggtgacagaaaagtcagagaacttgcccaagatcatacaggtaagaagtggcagggctgggattcaaacccaggcctgactgctgccaaaatctggtgtcttccttctacaccacgcttggggaccatctacctcagcccccctcaacagttttctgatggaaggaacacagacttgggcctcaagcaggcgtgaatttgaacctcaaatcagtccccactctgccattccgagttacatgatggtggagaaattacccagaactgtttcttcatctgctaaatggggagaatgaaagtggccaccccatggtctttgtgaaactgagggagtgaacgtgtgtaaagtgcgaaagcagtgcttgccacagagcagactcaatacacagaagttcccctcacctcccgctgtacagatgggcaaactgatgactccaggggtggcggggtgtgcctgaggccctaggaaaggagtcttccacttccgtgtggtgagaggtcaggctgggactggatctgagatgagagagggggcctgctgcgaagtcctggggtcctcttccctgaggactggagagagaacatccctagaccatgcagtgcacggcctgcgggccaaggtgggttgctgggtgtaaggtgacctgggcatcctggcaacatgggaataaactagaccacacacgtgtgcgcacgagtggctatctacatggctctacagagcgctacatagctatacatatacacatcttacatacatatacatatattcatatacagatcttgctacgtttacagtagaaaaaaatgctaggccctcagggccctggcccttttctcccaaggtcgcaggcatctgaggccccccagggcacgccccggggcagccccttcctgggggcagagtggagctccaacttacagctaaggggctgatggcagctgtttctctaaatgaacacaatgacacatctgctctaagaacccccaacactggccaccccgacccctgcccagccccgagaccccatctgcctttctctggcttttgcatttgggacctgcctgctccctcctccctccccctccctccctctagtgctgagtattaaaatagtctataaaagcaagtgaccaaaaatctatagctctaagaatacctggttattttctgctgtcttttgattttctggtgtgtgtggttttttaaataattattactgttattggtatatctcctaatcacagttaaacctgaaggaagaaggaacggagagaaaagaagaaagaagagggaagggcccagctcatagattggacggcagtttggagcgcactggctcaggcctggccccaggttccctctggggtccagcagtcagagggggccccccagaagaggtggctcttgccccaaacaaagacagagggggtggcaaagaacctgaggatgtcttccgaggcaaagtgacgtgctggccggggatggcaccatagggcctcccagggggaccaaggcccccgctgctcccactgcccccgctgccacccccagccctggggaagagcgggaaggcagccatggactcccctgaggagtgcggggaggctctgcggagagtctgtgccccgtcctgaggcagggctggctgagatgcagagatgagcttgaggtcctgggtgaggcggccgggggtgagggggggcgtgccccggcgctgggggacctggggtggtggggggctggatgcaggtggcagaagcaaggatccgtgggagccagaggcccggggtggggcacttgggaaggttcttggggggcctgggctgtggccgggggggctgagacctcctcggggagtaaagcctacaggggaagcccccccagaggcccctgccacaagggatggcggctcaggctgccgtgggggtgtctctggcgtgctgggtgggccagcagccagacctagggacaactccccaggaggctggcccagctgcccagggctagatgatggggatctggatgagggtgggggtggcaagaagtgctccgggagtcccaggcctccccgggccccgggtggtgccggaggtggctgggcagcctgcggggagcgggcgcctggctgcagcggggtgagcaggggagagtcggaggaggacagggagccgcccagtgccttgtggaagtggccaaacccggctgtggtggtggcggctgtgccagctgatggtatgggagccgagggggagccgcaggccccggggggtggggaggagctggatgagggcaggagtgggctcagtccggcgggggcagagaatccagccagctgttggatgtggaaggaggatgaagacggcgtgtctacctgggatgggctgctggcgggcgaggcggagcccagcgcagaagggatcagggactgcagccgtttcaggtgccttggcgtctgcccggcgccgaggttgcccagcccagatcctgggggagggcggaagatggcagcaggcaggcgagggtggtgggtgagggctatggccacagaagtggtggccgcggcagcctgcagtggtgcctggatcagcggggtccagatgacaggcgtgggggttggggtggcagaggcggcggcctggacgcggtgtgcgcagtgtgccatctcccggtcatgctgcacaatctgctggatgatctcgttctcctggtagttgaagacgcccgagttgaggtcgtgctggactttgtggaggaggatggagttcttcttgccgatgcggtccaggcggtccagcgccacagtctcaaaggcccttcgcatcatggggtactcctccagcacctcattgaagttgtccacgctcagcgagtagaggcggcagtaggtgtcggccctcacgctagctgtgcgccggccccgtgtcagcaggcagatctctccaaagtaggagccgtcggccagcttggtctccttgttgcccttggtgagcacgctgaccacgccgtgctggatgaagtacatcttcttgccgatggtgccttcccggatgatgtagtccccgggctggaagacctcgaaacgcagcttggtcagcatggacgtcacgaagttggggtccgcgttggcaaacagtggcatggaggccaccagcttccggcagttaaagttgatgatctcctcccgcaggggctcgctcagctcgcccagaatgctctcctcgtcgaacatcttgccctggtagcggtgctcgtagtagtcgtggatgcgctgccgggtgtcgggcgggagcttgtggaaggacatgtactgctccacctgcttatacttttcctggtactggcgccgggaggagtccagggactggatgagggcagtggcgtggccaatgaacatggcgtagcaggtggcgcccacgatcatgctgagcatggtgagccagacgtcggacatgcccacgggcgcctgccgtccgtagccgatgcacagcatgtggctcatggccttgaagagcgcgtaggagtactgcttcccccaggagttgttcaccatgttgttgatggacacccagcagtcatcaggaaagtcctgcagcatgggtaccaggaactgcaggcagccatcccagtggcagagcaggagcatcatgccgatgaggttcacgatgcgcaccacggcactggccaggtcgtaggtcatgtggaagatctcttcccactggtgaatataccgaatgaggcgggagaggcgtaacaagcgtaagaggctgaggatcttcgtgaagcggacgatgcgcagggcccgggcagtcttgtagacctccgagtcgatgcgtgtctccacaatgaggaagatgtagtccacagggatggaggaaatgaaatctaccatgaaccagcttttcaggtacttcattttaatccgctgtgggtccaggatgatctctgtgttgtcctccaccacgatccctgtgcggaagttgaggaccaagtcgatgaggaagaatgtgtctgacaccacattgaagacaatccagggtgtggtgttctcatccttgaagaaggtgatgcccacaggaatgatgatcaggtttcccaccatcagcagcagcatggtcaggtcccagtaaaatctgaagtcactgtaggggtggataatccaaaatccggccgacttgaccctctcctgctcgcgttccacggctttctggctgccgaacatccttagggagaatttgttgaccccgggttggagcatggccccgaactggcgctgcatgaagccggactggcccaagcgcacctcggcctccggaaggatctggtcgccggtggccgcgcctccctccactttgatagcggtgtccgccgagggctgctcgcaggaggaggaggccggctgcggtggctgctggggcggcggcggcgaggctgcgggctgcgccgaggcgccggggcgctcgggctcggccgccaggcctgggggcgtcctgtcctcgccgggggacgcgtcgccctcggcgatgagccgccgctcctccgcggagtcatgcaggtgtccgtgactgctgccgctccccgnnnnnnnnnnnnnnccgccccggctgcccagcgaggccaggctcccgcggaagcgcctgcagtcgccgttcgtgctggacttgcccgccccgcgggccgacccttcgctgtccgctgccccgagggccgagctccgggactccgtgccacccgcggccgccgagggcgagggcgagggcagtggccgcagccggatgctcctgcggctggggtcttggcggcccccggccccctcctcctcggcgtcctcttcctcgtccatgatccacgccttggcccccacctgctgcgggaggctgtagagccgcttgcgcatggacggtggcagcttgtccatggcgccaggggccggaccgagccgggggtaggggcgcggcgccgcggacgggctccaggtccgcccgccggtcagtccgcccgtggggactcgtccttcgccgccggcgtggggccgcctcaggcgcccatactcgggcaggctgcgcgccgctgggaggctcccagttgcgctccgagtccccgggctcgccgcgctgcgcctcctcccgggccgggctgggcgctcggaccccgcgctacctccttgcctccctccctccctctggcgttcaggggcgcggcgcgcggcccggctccaggcgccccgcccccgcggggaacaatgggcgccggctggagaggctctgcggccgcggcgctcggggaaccgctccggagcgcagagcgcacggcccgcgcgggtcccgggcgtgcgtcccgcgggagggctggctgtccgtctgtctcgccgcccggactttgtggctggccccccgcgacctcgtctcgcctcctctggcccggcccctctggcccgtcccggggctcccgccgcagccaagcggagcccagcgacccgccgggcttacatcagcggccgcctcccccggagcgccctccggccgcgctcgggctcccgcgccccggaatattcatgaagccgccgcagcacgcgggttgccataggagcggctcca

SEQ ID NO: 71 - RNA, 3838 nt, Homo sapiens
  source 1..3838: mol_type = mRNA
gattccgagcctacgacgcctccgctagagcccgcggggctgcgccgactcctgctctggaggggttgcgggtacctgatggccacagagggctctaggaggccgagcgtgtaagcggggtgggcgccatggaggcagagcagcggccggcggcgggggccagcgaaggggcgacccctggactggaggcggtgcctcccgttgctcccccgcctgcgaccgcggcctcaggtccgatccccaaatctgggcctgagcctaagaggaggcaccttgggacgctgctccagcctacggtcaacaagttctcccttcgggtgttcggcagccacaaagcagtggaaatcgagcaggagcgggtgaagtcagcgggggcctggatcatccacccctacagcgacttccggttttactgggacctgatcatgctgctgctgatggtggggaacctcatcgtcctgcctgtgggcatcaccttcttcaaggaggagaactccccgccttggatcgtcttcaacgtattgtctgatactttcttcctactggatctggtgctcaacttccgaacgggcatcgtggtggaggagggtgctgagatcctgctggcaccgcgggccatccgcacgcgctacctgcgcacctggttcctggttgacctcatctcttctatccctgtggattacatcttcctagtggtggagctggagccacggttggacgctgaggtctacaaaacggcacgggccctacgcatcgttcgcttcaccaagatcctaagcctgctgaggctgctccgcctctcccgcctcatccgctacatacaccagtgggaggagatctttcacatgacctatgacctggccagtgctgtggttcgcatcttcaacctcattgggatgatgctgctgctatgtcactgggatggctgtctgcagttcctggtgcccatgctgcaggacttccctcccgactgctgggtctccatcaaccacatggtgaaccactcgtggggccgccagtattcccatgccctgttcaaggccatgagccacatgctgtgcattggctatgggcagcaggcacctgtaggcatgcccgacgtctggctcaccatgctcagcatgatcgtaggtgccacatgctacgccatgttcatcggccatgccacggcactcatccagtccctggactcttcccggcgtcagtaccaggagaagtacaagcaggtggagcagtacatgtccttccacaagctgccagcagacacgcggcagcgcatccacgagtactatgagcaccgctaccagggcaagatgttcgatgaggaaagcatcctgggcgagctgagcgagccgcttcgcgaggagatcattaacttcacctgtcggggcctggtggcccacatgccgctgtttgcccatgccgaccccagcttcgtcactgcagttctcaccaagctgcgctttgaggtcttccagccgggggatctcgtggtgcgtgagggctccgtggggaggaagatgtacttcatccagcatgggctgctcagtgtgctggcccgcggcgcccgggacacacgcctcaccgatggatcctactttggggagatctgcctgctaactaggggccggcgcacagccagtgttcgggctgacacctactgccgcctttactcactcagcgtggaccatttcaatgctgtgcttgaggagttccccatgatgcgccgggcctttgagactgtggccatggatcggctgctccgcatcggcaagaagaattccatactgcagcggaagcgctccgagccaagtccaggcagcagtggtggcatcatggagcagcacttggtgcaacatgacagagacatggctcggggtgttcggggtcgggccccgagcacaggagctcagcttagtggaaagccagtactgtgggagccactggtacatgcgccccttcaggcagctgctgtgacctccaatgtggccattgccctgactcatcagcggggccctctgcccctctcccctgactctccagccaccctccttgctcgctctgcttggcgctcagcaggctctccagcttccccgctggtgcccgtccgagctggcccatgggcatccacctcccgcctgcccgccccacctgcccgaaccctgcacgccagcctatcccgggcagggcgctcccaggtctccctgctgggtccccctccaggaggaggtggacggcggctaggacctcggggccgcccactctcagcctcccaaccctctctgcctcagcgggcaacaggcgatggctctcctgggcgtaagggatcaggaagtgagcggctgcctccctcagggctcctggccaaacctccaaggacagcccagccccccaggccaccagtgcctgagccagccacaccccggggtctccagctttctgccaacatgtaaaacctttgagtacatccagccttagttcttggggtgcagtagtatgtacccaagggcagatgcctcttggggaaggccatggggacctgaaacattgccccatggaaatgtcgaccctgtgcggacattccgcatactgccatgaagacggtctctgtgtcctcagctcaagaatcctgtagcttgtcccatcataatccattcacccgttcatcatgtgtactgagcagctaccatgttcaaggtaatatgccaggcgctgtatgtctccactgccaagtagaagtgactcaaaaccctctgacaaggatattcccttggctatggtcctgccaggtgcaggcccaggcccatgaccccacctttactaagcacaagtacttgccactgccatcactgccaagtaactagatgtctctgtttccctgccaatgatcctgcaggttctgcccggtctggttatcttcctgttcctgtagcatagccaggcactgccagtcacctgtgcccccattgctgtcagcagatgtcttgggtcctgagtgtgggtatccacttttacccgctcactgccacctgtggacactctgtgtctaccctctgagtgggaacatacttctaagttccctgcagtctctgtcctgtggtagaccatctttttgtaaactgcgagcttcctcttccctgtaccctctgccccagtcgtgaccccctaaaagttaaggggtagttggcacctccttattaatatgccagcctagatcccccccggtggaggggcaaatggctgaatccttgtgtgatatttttttcttcgcttgtttatttattcatttatttaattgtatttattcatttactaactttatgtgttaccaattaattttgtttacccattcctttatccatccctcccctccttttcaggtaaggagacaggaggagtaggaggaggcagggcctctccatgccagcctctgtggtccttgcccaaacccatcagcgcaatacttgaaccttctcccaggtaggggcaggaggagccacatgagagagggagaaggaccgcgtttacctttagagttttgttttgttttttccttctgagtttgctgttggtgcaggaataagggaaaggcccaaggtatccaagcctggggaagggcaggccagccagcacctctgccttctcagggacaagagtagtcctttaccaccctcactctgcctgtcccctctcctactctacagcattaaagactgtgggaccaggaccctaagtctcctttccttctgggtggggagttctggggttcttggtgtgtgggagaagttttataattgcttccaaacagctgggtttaaatataaaatagacacactca

SEQ ID NO: 72 - RNA, 3838 nt, Homo sapiens
  source 1..3838: mol_type = mRNA
tgagtgtgtctattttatatttaaacccagctgtttggaagcaattataaaacttctcccacacaccaagaaccccagaactccccacccagaaggaaaggagacttagggtcctggtcccacagtctttaatgctgtagagtaggagaggggacaggcagagtgagggtggtaaaggactactcttgtccctgagaaggcagaggtgctggctggcctgcccttccccaggcttggataccttgggcctttcccttattcctgcaccaacagcaaactcagaaggaaaaaacaaaacaaaactctaaaggtaaacgcggtccttctccctctctcatgtggctcctcctgcccctacctgggagaaggttcaagtattgcgctgatgggtttgggcaaggaccacagaggctggcatggagaggccctgcctcctcctactcctcctgtctccttacctgaaaaggaggggagggatggataaaggaatgggtaaacaaaattaattggtaacacataaagttagtaaatgaataaatacaattaaataaatgaataaataaacaagcgaagaaaaaaatatcacacaaggattcagccatttgcccctccaccgggggggatctaggctggcatattaataaggaggtgccaactaccccttaacttttagggggtcacgactggggcagagggtacagggaagaggaagctcgcagtttacaaaaagatggtctaccacaggacagagactgcagggaacttagaagtatgttcccactcagagggtagacacagagtgtccacaggtggcagtgagcgggtaaaagtggatacccacactcaggacccaagacatctgctgacagcaatgggggcacaggtgactggcagtgcctggctatgctacaggaacaggaagataaccagaccgggcagaacctgcaggatcattggcagggaaacagagacatctagttacttggcagtgatggcagtggcaagtacttgtgcttagtaaaggtggggtcatgggcctgggcctgcacctggcaggaccatagccaagggaatatccttgtcagagggttttgagtcacttctacttggcagtggagacatacagcgcctggcatattaccttgaacatggtagctgctcagtacacatgatgaacgggtgaatggattatgatgggacaagctacaggattcttgagctgaggacacagagaccgtcttcatggcagtatgcggaatgtccgcacagggtcgacatttccatggggcaatgtttcaggtccccatggccttccccaagaggcatctgcccttgggtacatactactgcaccccaagaactaaggctggatgtactcaaaggttttacatgttggcagaaagctggagaccccggggtgtggctggctcaggcactggtggcctggggggctgggctgtccttggaggtttggccaggagccctgagggaggcagccgctcacttcctgatcccttacgcccaggagagccatcgcctgttgcccgctgaggcagagagggttgggaggctgagagtgggcggccccgaggtcctagccgccgtccacctcctcctggagggggacccagcagggagacctgggagcgccctgcccgggataggctggcgtgcagggttcgggcaggtggggcgggcaggcgggaggtggatgcccatgggccagctcggacgggcaccagcggggaagctggagagcctgctgagcgccaagcagagcgagcaaggagggtggctggagagtcaggggagaggggcagagggccccgctgatgagtcagggcaatggccacattggaggtcacagcagctgcctgaaggggcgcatgtaccagtggctcccacagtactggctttccactaagctgagctcctgtgctcggggcccgaccccgaacaccccgagccatgtctctgtcatgttgcaccaagtgctgctccatgatgccaccactgctgcctggacttggctcggagcgcttccgctgcagtatggaattcttcttgccgatgcggagcagccgatccatggccacagtctcaaaggcccggcgcatcatggggaactcctcaagcacagcattgaaatggtccacgctgagtgagtaaaggcggcagtaggtgtcagcccgaacactggctgtgcgccggcccctagttagcaggcagatctccccaaagtaggatccatcggtgaggcgtgtgtcccgggcgccgcgggccagcacactgagcagcccatgctggatgaagtacatcttcctccccacggagccctcacgcaccacgagatcccccggctggaagacctcaaagcgcagcttggtgagaactgcagtgacgaagctggggtcggcatgggcaaacagcggcatgtgggccaccaggccccgacaggtgaagttaatgatctcctcgcgaagcggctcgctcagctcgcccaggatgctttcctcatcgaacatcttgccctggtagcggtgctcatagtactcgtggatgcgctgccgcgtgtctgctggcagcttgtggaaggacatgtactgctccacctgcttgtacttctcctggtactgacgccgggaagagtccagggactggatgagtgccgtggcatggccgatgaacatggcgtagcatgtggcacctacgatcatgctgagcatggtgagccagacgtcgggcatgcctacaggtgcctgctgcccatagccaatgcacagcatgtggctcatggccttgaacagggcatgggaatactggcggccccacgagtggttcaccatgtggttgatggagacccagcagtcgggagggaagtcctgcagcatgggcaccaggaactgcagacagccatcccagtgacatagcagcagcatcatcccaatgaggttgaagatgcgaaccacagcactggccaggtcataggtcatgtgaaagatctcctcccactggtgtatgtagcggatgaggcgggagaggcggagcagcctcagcaggcttaggatcttggtgaagcgaacgatgcgtagggcccgtgccgttttgtagacctcagcgtccaaccgtggctccagctccaccactaggaagatgtaatccacagggatagaagagatgaggtcaaccaggaaccaggtgcgcaggtagcgcgtgcggatggcccgcggtgccagcaggatctcagcaccctcctccaccacgatgcccgttcggaagttgagcaccagatccagtaggaagaaagtatcagacaatacgttgaagacgatccaaggcggggagttctcctccttgaagaaggtgatgcccacaggcaggacgatgaggttccccaccatcagcagcagcatgatcaggtcccagtaaaaccggaagtcgctgtaggggtggatgatccaggcccccgctgacttcacccgctcctgctcgatttccactgctttgtggctgccgaacacccgaagggagaacttgttgaccgtaggctggagcagcgtcccaaggtgcctcctcttaggctcaggcccagatttggggatcggacctgaggccgcggtcgcaggcgggggagcaacgggaggcaccgcctccagtccaggggtcgccccttcgctggcccccgccgccggccgctgctctgcctccatggcgcccaccccgcttacacgctcggcctcctagagccctctgtggccatcaggtacccgcaacccctccagagcaggagtcggcgcagccccgcgggctctagcggaggcgtcgtaggctcggaatc

SEQ ID NO: 73 - RNA, 3268 nt, Mus musculus
  source 1..3268: mol_type = mRNA
gcgggtcggagctcccctgcctgggctgctctcccagagacttgcgcgcccgccatggccctggaccggttggggaggccctacgagtgagggcaatcatggaggaggaggcgcggccggcggcgggggccggcgaagcggcgacccctgcacgcgagacgcctcctgcggctccggcccaggcccgcgcggcctcaggtggggtgccggagtctgcgcccgagccgaagaggcggcagctcgggacgctgctgcagccgacggtcaacaagttctctctccgggtcttcggcagccacaaagcagtagaaatcgagcaggagagggtgaagtccgccggggcctggatcatccacccctacagcgacttccggttttactgggatctcatcatgctgctgctgatggtggggaacctcatagttctgcctgtgggtatcactttcttcaaggaggagaactctccaccctggatcgtcttcaatgtcctctctgacactttcttcctgctggatctggtgctcaacttccgaactggcatcgtggtggaggaaggtgccgagatcctgctggcgccaagggccatccgaacgcgttacctgcgcacctggttcctggttgatctgatctcctccatccctgtggattatatcttcctagtggtggagctggagccacgactagatgctgaggtctacaaaacggcacgggccctgcgcatcgttagattcaccaagatccttagcctgctgcggctgctccgcctctcccgcctcatccgctacatacaccagtgggaggagatctttcacatgacctacgacctggccagtgcagtggttcgcatcttcaacctcattggaatgatgttgctgctgtgtcactgggacggctgtctgcagtttctggtccctatgctgcaggacttcccgtccgactgctgggtctccatgaaccgcatggtgaaccactcgtggggccgccagtattcccacgccctgttcaaggccatgagtcacatgctatgcattggctatgggcagcaggcaccggtaggcatgcctgacgtctggctcaccatgctcagtatgattgtgggcgccacgtgttatgccatgttcatcggtcacgccaccgccctcatccagtccctggactcttcccggcgacagtaccaggagaagtacaagcaggtggagcagtacatgtccttccacaagctgcccgctgacacccggcagcgcatccacgagtactacgagcatcgctaccagggcaagatgtttgatgaagagagcatcctgggggagctgagcgagccacttcgggaggagattattaacttcacctgccggggcctggtggcccacatgccgctgtttgctcatgctgaccccagcttcgtcaccgcagtgctcaccaagctccgttttgaggtcttccaaccaggggacctggtggtgcgtgagggctccgtgggcaggaagatgtacttcatccagcacgggctgctgagtgtgctggcacgtggcgcccgcgacacccgcctcactgatggatcctactttggggagatctgcctgctgactcgaggtcggagaacagccagtgtaagggctgacacctattgtcgcctctactcgctcagcgtggaccacttcaatgcggtgcttgaggagttcccaatgatgcgcagggcttttgagacggtggccatggaccggcttcggcgcatcggcaaaaagaattcgatactgcagcggaaacgctctgagccgagtccaggcagcagcggtggcgtcatggagcagcatttggtacaacacgacagagacatggctcgtggtgttcggggcctggctcctggtacaggagctcgactcagtggaaagccagtgctgtgggaaccactggtgcacgcccctctgcaggcagctgctgtgacctccaacgtggccatagccttgactcaccagcgaggccctctgcccctctcccctgattctccagccaccctcctagctcgatctgctagacgctcagcaggctccccagcctccccactggtgcctgtccgagcaggtcctctgctggcccggggaccctgggcgtccacttctcgcctgcctgctccacctgcccgaaccctccatgccagcctatcccggacagggcgttcccaggtatctctgttgggccctcccccaggaggaggtgctcggaggctaggacctcggggccgcccactttctgcctcgcaaccctctctgcctcagcgagcaacaggggatggctctcctaggcgtaaaggctctggaagtgagcgcctgcccccctctgggctcttggccaaacctccagggacagtccagccacccaggtcatcagtgcctgagccagttacccccagaggtccccaaatttctgccaacatgtgaaatcctaggttacactggccttagctattggcacgcaataacgtgtgcccgagggtagacgccccttgggggaaggctgtgggggacctaacatactgccctttatcaccacaaagctattctctgtgtcctcagctcaaagcagctgcagcctgctaatcctaatcacatacccatttgtcattggtaccccatgcctaccatgttcaaggcactgtgctaggtactgtgtatccactgccaagtagaaataactcgaagccctttaacaagggtgtccccaggccacggtcctgccaggcgcaggcctgggcccacagccctgcctttattaagcacaagtacttgctgcctccatcactgccgagtaactagacggctgtctccctgtcagtgaccctgcaggtggtgccagtgcgtcctctcttcccatctcctttgtcgtagctgggtaccgtcaattatctagtacagccaacagatgtctagagccctgggtgtgaacatcgaccctctgactggcacctgtgggccctccttgtccacaccaagtgagaatccacgtctgcccactgtagtctgccctccgcagctcctgtgtggacgcactacctttatgagctagaagctgctcttcactgtgccccctgcctcagtggtgttgcccctaaagctaaggggcacgcggcacctccttacctactgtgccagcctagttccccccaggtagggggccaggggctgaatcctcatgtgaccttttatctttccctctttgtcttatttatttggtcgtttattaattttatttattcatttgctaaaaaaaa

SEQ ID NO: 74 - RNA, 3268 nt, Mus musculus
  source 1..3268: mol_type = mRNA
ttttttttagcaaatgaataaataaaattaataaacgaccaaataaataagacaaagagggaaagataaaaggtcacatgaggattcagcccctggccccctacctggggggaactaggctggcacagtaggtaaggaggtgccgcgtgccccttagctttaggggcaacaccactgaggcagggggcacagtgaagagcagcttctagctcataaaggtagtgcgtccacacaggagctgcggagggcagactacagtgggcagacgtggattctcacttggtgtggacaaggagggcccacaggtgccagtcagagggtcgatgttcacacccagggctctagacatctgttggctgtactagataattgacggtacccagctacgacaaaggagatgggaagagaggacgcactggcaccacctgcagggtcactgacagggagacagccgtctagttactcggcagtgatggaggcagcaagtacttgtgcttaataaaggcagggctgtgggcccaggcctgcgcctggcaggaccgtggcctggggacacccttgttaaagggcttcgagttatttctacttggcagtggatacacagtacctagcacagtgccttgaacatggtaggcatggggtaccaatgacaaatgggtatgtgattaggattagcaggctgcagctgctttgagctgaggacacagagaatagctttgtggtgataaagggcagtatgttaggtcccccacagccttcccccaaggggcgtctaccctcgggcacacgttattgcgtgccaatagctaaggccagtgtaacctaggatttcacatgttggcagaaatttggggacctctgggggtaactggctcaggcactgatgacctgggtggctggactgtccctggaggtttggccaagagcccagaggggggcaggcgctcacttccagagcctttacgcctaggagagccatcccctgttgctcgctgaggcagagagggttgcgaggcagaaagtgggcggccccgaggtcctagcctccgagcacctcctcctgggggagggcccaacagagatacctgggaacgccctgtccgggataggctggcatggagggttcgggcaggtggagcaggcaggcgagaagtggacgcccagggtccccgggccagcagaggacctgctcggacaggcaccagtggggaggctggggagcctgctgagcgtctagcagatcgagctaggagggtggctggagaatcaggggagaggggcagagggcctcgctggtgagtcaaggctatggccacgttggaggtcacagcagctgcctgcagaggggcgtgcaccagtggttcccacagcactggctttccactgagtcgagctcctgtaccaggagccaggccccgaacaccacgagccatgtctctgtcgtgttgtaccaaatgctgctccatgacgccaccgctgctgcctggactcggctcagagcgtttccgctgcagtatcgaattctttttgccgatgcgccgaagccggtccatggccaccgtctcaaaagccctgcgcatcattgggaactcctcaagcaccgcattgaagtggtccacgctgagcgagtagaggcgacaataggtgtcagcccttacactggctgttctccgacctcgagtcagcaggcagatctccccaaagtaggatccatcagtgaggcgggtgtcgcgggcgccacgtgccagcacactcagcagcccgtgctggatgaagtacatcttcctgcccacggagccctcacgcaccaccaggtcccctggttggaagacctcaaaacggagcttggtgagcactgcggtgacgaagctggggtcagcatgagcaaacagcggcatgtgggccaccaggccccggcaggtgaagttaataatctcctcccgaagtggctcgctcagctcccccaggatgctctcttcatcaaacatcttgccctggtagcgatgctcgtagtactcgtggatgcgctgccgggtgtcagcgggcagcttgtggaaggacatgtactgctccacctgcttgtacttctcctggtactgtcgccgggaagagtccagggactggatgagggcggtggcgtgaccgatgaacatggcataacacgtggcgcccacaatcatactgagcatggtgagccagacgtcaggcatgcctaccggtgcctgctgcccatagccaatgcatagcatgtgactcatggccttgaacagggcgtgggaatactggcggccccacgagtggttcaccatgcggttcatggagacccagcagtcggacgggaagtcctgcagcatagggaccagaaactgcagacagccgtcccagtgacacagcagcaacatcattccaatgaggttgaagatgcgaaccactgcactggccaggtcgtaggtcatgtgaaagatctcctcccactggtgtatgtagcggatgaggcgggagaggcggagcagccgcagcaggctaaggatcttggtgaatctaacgatgcgcagggcccgtgccgttttgtagacctcagcatctagtcgtggctccagctccaccactaggaagatataatccacagggatggaggagatcagatcaaccaggaaccaggtgcgcaggtaacgcgttcggatggcccttggcgccagcaggatctcggcaccttcctccaccacgatgccagttcggaagttgagcaccagatccagcaggaagaaagtgtcagagaggacattgaagacgatccagggtggagagttctcctccttgaagaaagtgatacccacaggcagaactatgaggttccccaccatcagcagcagcatgatgagatcccagtaaaaccggaagtcgctgtaggggtggatgatccaggccccggcggacttcaccctctcctgctcgatttctactgctttgtggctgccgaagacccggagagagaacttgttgaccgtcggctgcagcagcgtcccgagctgccgcctcttcggctcgggcgcagactccggcaccccacctgaggccgcgcgggcctgggccggagccgcaggaggcgtctcgcgtgcaggggtcgccgcttcgccggcccccgccgccggccgcgcctcctcctccatgattgccctcactcgtagggcctccccaaccggtccagggccatggcgggcgcgcaagtctctgggagagcagcccaggcaggggagctccgacccgc

SEQ ID NO: 75 - RNA, 2343 nt, Rattus norvegicus
  source 1..2343: mol_type = mRNA
atggaggaggaggcgcggccggcggtgggggacggggaagcggcgactcctgcacgcgagacgcctcctgcggctcccgcccaggcccgcgcggcctcaggtggggtgccagagtctgcgcccgagccgaagaggcggcagctcgggacgctgctgcagccgaccgtcaacaagttctctctccgggtcttcggcagccacaaagcggtggaaatcgagcaggagagggtgaagtccgccggggcctggatcatccacccctacagcgacttccggttttactgggacctgatcatgctgctgctgatggtggggaacctcatagtactgcccgtgggcatcactttcttcaaggaggagaactccccaccctggatcgtcttcaatgtcctctcggacactttcttcctgctggatctggtgctcaacttccgaactggcatcgtggtggaggaaggtgcggagatcctgttggcgcccagggctatccgcacgcgttacctgcgcacctggttcctggtggacctgatttcctccatccctgtggattacatcttcctagtggtagagctggagccacgactagacgctgaggtctacaaaacggcacgggccctgcgcatcgttagattcaccaagatccttagcctgctgcggctgctccgcctctcccgcctcatccgatacatgcaccagtgggaggagatctttcacatgacctacgacctggccagtgcagtggttcgcatcttcaacctcattggaatgatgttgctgctgtgtcactgggatggctgtctgcagttcctggtccctatgctgcaggacttcccttccgactgctgggtctccatgaaccgcatggtgaaccactcgtggggccgccagtactcccacgccctgttcaaggccatgagtcacatgctgtgcattggctacgggcagcaggcaccagtaggcatgcctgacgtctggctcaccatgctcagcatgattgtgggcgccacctgctatgccatgttcatcggccacgccaccgccctcatccagtccctggactcgtcccggcgccagtaccaggagaagtacaagcaggtggagcagtacatgtccttccacaagctgccagccgacacacggcagcgcatccacgagtactacgagcatcggtaccagggcaagatgttcgatgaagagagcatcctgggggagctgagcgagccgcttcgggaggagattattaacttcacctgccggggcctggtggcccacatgccgctgtttgctcatgctgaccccagtttcgtcaccgcagtactcaccaagctccgttttgaggtcttccaacctggggatctggtggtgcgtgagggctccgtgggcaggaagatgtacttcatccagcatgggctgctcagtgtgttggcacggggcgcccgggacactcgcctcactgacggatcctactttggggagatctgcctgctgactcgaggtcggagaacagccagtgtaagggctgacacctactgtcgcctctactcactcagcgtggaccacttcaatgcagtgcttgaggagttcccgatgatgcgcagggcttttgagactgtggccatggaccggcttcggcgcatcggcaaaaagaattcgatattgcagcggaaacgctctgagccgagtccaggcagcagcagtggtggcgtcatggagcagcatttggtacaacacgacagagacatggctcgtggtattcggggtctggctccgggcacaggagctcgcctcagtggaaagccagtgctgtgggaaccactggtacacgcacctctgcaggcagctgctgtgacctccaacgtggccatagccttgactcatcagcgaggccctctgcccctctcccctgattctccagccaccctcctggctcgatctgctagacgctcagcaggctccccagcctccccactggtgcctgtccgagcaggtcctctgctggcccggggaccctgggcgtccacttctcgcctgcctgctccacctgcccgaaccctccatgccagcctatcccggacagggcgttcccaggtgtctctgttgggccctcccccaggaggaggtggtcggaggctaggacctcggggccgcccactctctgcctctcaaccctctctgcctcagcgagccacgggggatggctctcctaggcgcaaaggctctggaagtgagcgtctgcccccctcggggctcctggccaagcctccagggactgtccagccatccaggtcatcagtgcctgagccagttacccccagaggtccccaaatttctgccaacatgtga

SEQ ID NO: 76 - RNA, 2343 nt, Rattus norvegicus
  source 1..2343: mol_type = mRNA
tcacatgttggcagaaatttggggacctctgggggtaactggctcaggcactgatgacctggatggctggacagtccctggaggcttggccaggagccccgaggggggcagacgctcacttccagagcctttgcgcctaggagagccatcccccgtggctcgctgaggcagagagggttgagaggcagagagtgggcggccccgaggtcctagcctccgaccacctcctcctgggggagggcccaacagagacacctgggaacgccctgtccgggataggctggcatggagggttcgggcaggtggagcaggcaggcgagaagtggacgcccagggtccccgggccagcagaggacctgctcggacaggcaccagtggggaggctggggagcctgctgagcgtctagcagatcgagccaggagggtggctggagaatcaggggagaggggcagagggcctcgctgatgagtcaaggctatggccacgttggaggtcacagcagctgcctgcagaggtgcgtgtaccagtggttcccacagcactggctttccactgaggcgagctcctgtgcccggagccagaccccgaataccacgagccatgtctctgtcgtgttgtaccaaatgctgctccatgacgccaccactgctgctgcctggactcggctcagagcgtttccgctgcaatatcgaattctttttgccgatgcgccgaagccggtccatggccacagtctcaaaagccctgcgcatcatcgggaactcctcaagcactgcattgaagtggtccacgctgagtgagtagaggcgacagtaggtgtcagcccttacactggctgttctccgacctcgagtcagcaggcagatctccccaaagtaggatccgtcagtgaggcgagtgtcccgggcgccccgtgccaacacactgagcagcccatgctggatgaagtacatcttcctgcccacggagccctcacgcaccaccagatccccaggttggaagacctcaaaacggagcttggtgagtactgcggtgacgaaactggggtcagcatgagcaaacagcggcatgtgggccaccaggccccggcaggtgaagttaataatctcctcccgaagcggctcgctcagctcccccaggatgctctcttcatcgaacatcttgccctggtaccgatgctcgtagtactcgtggatgcgctgccgtgtgtcggctggcagcttgtggaaggacatgtactgctccacctgcttgtacttctcctggtactggcgccgggacgagtccagggactggatgagggcggtggcgtggccgatgaacatggcatagcaggtggcgcccacaatcatgctgagcatggtgagccagacgtcaggcatgcctactggtgcctgctgcccgtagccaatgcacagcatgtgactcatggccttgaacagggcgtgggagtactggcggccccacgagtggttcaccatgcggttcatggagacccagcagtcggaagggaagtcctgcagcatagggaccaggaactgcagacagccatcccagtgacacagcagcaacatcattccaatgaggttgaagatgcgaaccactgcactggccaggtcgtaggtcatgtgaaagatctcctcccactggtgcatgtatcggatgaggcgggagaggcggagcagccgcagcaggctaaggatcttggtgaatctaacgatgcgcagggcccgtgccgttttgtagacctcagcgtctagtcgtggctccagctctaccactaggaagatgtaatccacagggatggaggaaatcaggtccaccaggaaccaggtgcgcaggtaacgcgtgcggatagccctgggcgccaacaggatctccgcaccttcctccaccacgatgccagttcggaagttgagcaccagatccagcaggaagaaagtgtccgagaggacattgaagacgatccagggtggggagttctcctccttgaagaaagtgatgcccacgggcagtactatgaggttccccaccatcagcagcagcatgatcaggtcccagtaaaaccggaagtcgctgtaggggtggatgatccaggccccggcggacttcaccctctcctgctcgatttccaccgctttgtggctgccgaagacccggagagagaacttgttgacggtcggctgcagcagcgtcccgagctgccgcctcttcggctcgggcgcagactctggcaccccacctgaggccgcgcgggcctgggcgggagccgcaggaggcgtctcgcgtgcaggagtcgccgcttccccgtcccccaccgccggccgcgcctcctcctccat

SEQ ID NO: 77 - RNA, 3844 nt, Macaca mulatta
  source 1..3844: mol_type = mRNA
ttccgagcctacgacgcctccgctggaacccgcggggctgcgccgactcccactctggaggggttgggggtacctgatggccacatagggctctaggaggccgagcgtgtaagcggggtgggcgccatggaggcggagcaggggccggttgcgggggccagcgaaggggcgacccctgggctggaggcccccaaggtgcctcccgttgctccccggcctgcgaccgcggcctcaggtccgatccccggatctgagtctgagcctaagagaaggcaccttgggacgctgctccaacctacggtcaacaagttctcccttcgggtgttcggcagccacaaagcagtggaaatcgagcaggagagagtgaagtcagcgggggcctggatcatccacccttacagcgacttccggttttactgggacctgatcatgctgctgctgatggtggggaacctcatcgtcctgcctgtgggtatcaccttcttcaaggaggagaactccccgccttggatcgtcttcaacgtattgtctgatactttcttcctactggatctggtgctgaacttccgaacgggcattgtggtggaggagggtgctgagatcctgctagcaccgcgggccatccgcacgcgctacctgcgcacctggttcctggttgacctcatctcttctatccctgtggattacatcttcctggtggtggagctggagccacagttggacgccgaggtctacaaaacggcacgggccctacgcatcgttcgcttcaccaagatcctaagcctgctgcggctgctccgcctctcccgcctcatccgctatatacaccagtgggaggagatctttcacatgacctatgacctggccagtgctgtggttcgcatcttcaacctcattgggatgatgctgctgctatgtcactgggatggctgtctgcagttcctggtgcccatgctgcaggacttccctcccgactgctgggtctccatcaaccacatggtgaaccactcgtggggccgccaatattcccatgccctgttcaaggccatgagccacatgctgtgcattggctatgggcagcaggcacctgtaggcatgcccgacgtctggctcaccatgctcagcatgatcgtgggtgccacatgctacgccatgttcatcggccacgccacggcactcatccagtccctggactcttcccggcgtcagtaccaggagaagtataagcaggtggagcagtacatgtccttccacaagctgccagcagacacgcggcagcgcatccacgagtactatgagcaccgctaccagggcaagatgttcgacgaggaaagcatcctgggcgagctgagcgagccgcttcgggaggagatcattaacttcacctgtcggggcctggtggcccacatgccgctgtttgcccacgccgaccccagcttcgtcactgcagtcctcaccaagctgcgctttgaggtcttccagccgggggacctcgtggtgcgtgagggctccatggggaggaagatgtacttcatccagcatgggttgctcagtgtgctggcccgcggcgcccgggacacacgcctcaccgatggatcctactttggggagatctgcctgctaactaggggccggcgcacagccagtgttcgggctgacacctactgccgcctctactcactcagtgtggaccatttcaacgctgtgctcgaggagttccccatgatgcgccgggcctttgagaccgtggccatggatcggctgcgccgcattggcaagaagaattccatactgcagcggaagcgctctgagccaagtccaggcagcagtggtggtggcatcatggagcagcacttggtgcaacatgacagagacatggctcgtggtgttcggggtctggccccgagcacaggagctcggctcagtggaaagccagtactgtgggagccactggtacatgcgccccttcaggcagctgctgttacctccaatgtggccattgccctgactcaccagcggggccctctgcccctctcccctgactctccagccaccctccttgctcgctctgctcggcgctcagcagggtctccagcttccccgctggtgcccgtccgagctggcccgtgggcatccacctcccgcctgcccgccccacctgcccgaaccctgcatgccagcctatcccgggcagggtgctcccaggtctccctgctgggtccccccccaggaggaggtggacggcggctaggacctcgaggccgcccactgtcagcctcccaaccctctctgcctcagcgggcatcaggcgatggctctcctgggcgtaagggatcaggaaatgagcggctgcctccctcagggctcctggccaagcctccaaggacagcccagccccccaggccaccagtgcctgagccagccaccccccggggtctccagctttctgccaacatgtaaaacccttgagtatatccagccttagttcttggggtgcagtagtatgtactctaaggcagatgcctcttggggaaggccgtggggacctgaaacattgccccatggaaatgtcgaccctgtgcggacattccccatactgccatgaagacggtctctgctcaagaatcctgtagcttgtcccatcataatccattcacccattcatcatgtgtactgagcagctaccatgttcaaggtaatatgccaggcgctgtatgtctccactgccaagtagaagtgactcaaaaccctctgacaagaatattcccctggctatggtcctgccaggtgcaggcccaggcccatgaccccacctttactaagcacaagtacttgccaccgccatcactgccaagtagctagatgtctctgtttccctgccgatgatcctgcaggttctgcctggcctggttatcttcctgttcctgtagcatagccaggcactgccaatcacctgcgcccccattactgccagcagatgtcttgagtcctgagtgtaggtatccacctttacccactcactgccacctgtggacactccgtgtctaccccctgagtgggagcacacttctaagttccctgcagtctctgtcctgtggtagaccatctttttgtaaaccgggaggtgcctctcccctgtaccctctgccccagtcatgcccccctaaaggttaaggagtagttggcacctccttattaatatgccagcctagatccccgctggtggaggggcaaatggctgaatccttgtgagagatttttttctttgcttgtttatttatttattcatttatttaattgtatttattcatttactaattttatgtgttaccaattcattttgtttacccattcctttatccatccctcccctccttttcagataaggagacaggaggagtaggaggaggcagggcctctccatgccagcctctgtggtcctttcccaaacccatcagcgcaatacttgaaccttctcccaggtaggggcaggaggagccacatgagagaggagaaaggactgtgtttacctttagagttttgttttgtttttttccttctgagtttgctgttggtgcaggagtaagggaaaggcccaaggtatccaagcctgggaagggcaggccagccagcacctctgccttctcagggacaagagcagtcctttaccacactcactcactctgtctgtcccctctgctactctacagcattagagactgtggggccaggaccccaagtctcctttccttctgggtggggagttctggggttgttggtgtgtgggagaagttttataattgcttccaaacagctgggtttaaatataaaatagacacactca

SEQ ID NO: 78 - RNA, 3844 nt, Macaca mulatta
  source 1..3844: mol_type = mRNA
tgagtgtgtctattttatatttaaacccagctgtttggaagcaattataaaacttctcccacacaccaacaaccccagaactccccacccagaaggaaaggagacttggggtcctggccccacagtctctaatgctgtagagtagcagaggggacagacagagtgagtgagtgtggtaaaggactgctcttgtccctgagaaggcagaggtgctggctggcctgcccttcccaggcttggataccttgggcctttcccttactcctgcaccaacagcaaactcagaaggaaaaaaacaaaacaaaactctaaaggtaaacacagtcctttctcctctctcatgtggctcctcctgcccctacctgggagaaggttcaagtattgcgctgatgggtttgggaaaggaccacagaggctggcatggagaggccctgcctcctcctactcctcctgtctccttatctgaaaaggaggggagggatggataaaggaatgggtaaacaaaatgaattggtaacacataaaattagtaaatgaataaatacaattaaataaatgaataaataaataaacaagcaaagaaaaaaatctctcacaaggattcagccatttgcccctccaccagcggggatctaggctggcatattaataaggaggtgccaactactccttaacctttaggggggcatgactggggcagagggtacaggggagaggcacctcccggtttacaaaaagatggtctaccacaggacagagactgcagggaacttagaagtgtgctcccactcagggggtagacacggagtgtccacaggtggcagtgagtgggtaaaggtggatacctacactcaggactcaagacatctgctggcagtaatgggggcgcaggtgattggcagtgcctggctatgctacaggaacaggaagataaccaggccaggcagaacctgcaggatcatcggcagggaaacagagacatctagctacttggcagtgatggcggtggcaagtacttgtgcttagtaaaggtggggtcatgggcctgggcctgcacctggcaggaccatagccaggggaatattcttgtcagagggttttgagtcacttctacttggcagtggagacatacagcgcctggcatattaccttgaacatggtagctgctcagtacacatgatgaatgggtgaatggattatgatgggacaagctacaggattcttgagcagagaccgtcttcatggcagtatggggaatgtccgcacagggtcgacatttccatggggcaatgtttcaggtccccacggccttccccaagaggcatctgccttagagtacatactactgcaccccaagaactaaggctggatatactcaagggttttacatgttggcagaaagctggagaccccggggggtggctggctcaggcactggtggcctggggggctgggctgtccttggaggcttggccaggagccctgagggaggcagccgctcatttcctgatcccttacgcccaggagagccatcgcctgatgcccgctgaggcagagagggttgggaggctgacagtgggcggcctcgaggtcctagccgccgtccacctcctcctggggggggacccagcagggagacctgggagcaccctgcccgggataggctggcatgcagggttcgggcaggtggggcgggcaggcgggaggtggatgcccacgggccagctcggacgggcaccagcggggaagctggagaccctgctgagcgccgagcagagcgagcaaggagggtggctggagagtcaggggagaggggcagagggccccgctggtgagtcagggcaatggccacattggaggtaacagcagctgcctgaaggggcgcatgtaccagtggctcccacagtactggctttccactgagccgagctcctgtgctcggggccagaccccgaacaccacgagccatgtctctgtcatgttgcaccaagtgctgctccatgatgccaccaccactgctgcctggacttggctcagagcgcttccgctgcagtatggaattcttcttgccaatgcggcgcagccgatccatggccacggtctcaaaggcccggcgcatcatggggaactcctcgagcacagcgttgaaatggtccacactgagtgagtagaggcggcagtaggtgtcagcccgaacactggctgtgcgccggcccctagttagcaggcagatctccccaaagtaggatccatcggtgaggcgtgtgtcccgggcgccgcgggccagcacactgagcaacccatgctggatgaagtacatcttcctccccatggagccctcacgcaccacgaggtcccccggctggaagacctcaaagcgcagcttggtgaggactgcagtgacgaagctggggtcggcgtgggcaaacagcggcatgtgggccaccaggccccgacaggtgaagttaatgatctcctcccgaagcggctcgctcagctcgcccaggatgctttcctcgtcgaacatcttgccctggtagcggtgctcatagtactcgtggatgcgctgccgcgtgtctgctggcagcttgtggaaggacatgtactgctccacctgcttatacttctcctggtactgacgccgggaagagtccagggactggatgagtgccgtggcgtggccgatgaacatggcgtagcatgtggcacccacgatcatgctgagcatggtgagccagacgtcgggcatgcctacaggtgcctgctgcccatagccaatgcacagcatgtggctcatggccttgaacagggcatgggaatattggcggccccacgagtggttcaccatgtggttgatggagacccagcagtcgggagggaagtcctgcagcatgggcaccaggaactgcagacagccatcccagtgacatagcagcagcatcatcccaatgaggttgaagatgcgaaccacagcactggccaggtcataggtcatgtgaaagatctcctcccactggtgtatatagcggatgaggcgggagaggcggagcagccgcagcaggcttaggatcttggtgaagcgaacgatgcgtagggcccgtgccgttttgtagacctcggcgtccaactgtggctccagctccaccaccaggaagatgtaatccacagggatagaagagatgaggtcaaccaggaaccaggtgcgcaggtagcgcgtgcggatggcccgcggtgctagcaggatctcagcaccctcctccaccacaatgcccgttcggaagttcagcaccagatccagtaggaagaaagtatcagacaatacgttgaagacgatccaaggcggggagttctcctccttgaagaaggtgatacccacaggcaggacgatgaggttccccaccatcagcagcagcatgatcaggtcccagtaaaaccggaagtcgctgtaagggtggatgatccaggcccccgctgacttcactctctcctgctcgatttccactgctttgtggctgccgaacacccgaagggagaacttgttgaccgtaggttggagcagcgtcccaaggtgccttctcttaggctcagactcagatccggggatcggacctgaggccgcggtcgcaggccggggagcaacgggaggcaccttgggggcctccagcccaggggtcgccccttcgctggcccccgcaaccggcccctgctccgcctccatggcgcccaccccgcttacacgctcggcctcctagagccctatgtggccatcaggtacccccaacccctccagagtgggagtcggcgcagccccgcgggttccagcggaggcgtcgtaggctcggaa

SEQ ID NO: 79 - RNA, 3882 nt, Macaca fascicularis
  source 1..3882: mol_type = mRNA
agtctagcgcacaccccctccgccccgcgcgccggcggttccgagcctacgacgcctccgctggaacccgcggggctgcgccgactcccactctggaggggttgggggtacctgatggccacatagggctctaggaggcggagcgtgtaagcggggtgggcgccatggaggcggagcaggggccggttgcgggggccagcgaaggggcgacccctgggctggaggcccccaaggtgcctcccgttgctccccggcctgcgaccgcggcctcaggtccgatccccggatctgagtctgagcctaagagaaggcaccttgggacgctgctccaacctacggtcaacaagttctcccttcgggtgttcggcagccacaaagcagtggaaatcgagcaggagagagtgaagtcagcgggggcctggatcatccacccttacagcgacttccggttttactgggacctgatcatgctgctgctgatggtggggaacctcatcgtcctgcctgtgggtatcaccttcttcaaggaggagaactccccgccttggatcgtcttcaacgtattgtctgatactttcttcctactggatctggtgctcaacttccgaacgggcattgtggtggaggagggtgctgagatcctgctagcaccgcgggccatccgcacgcgctacctgcgcacctggttcctggttgacctcatctcttctatccctgtggattacatcttcctggtggtggagctggagccacagttggacgctgaggtctacaaaacggcacgggccctacgcatcgttcgcttcaccaagatcctaagcctgctgcggctgctccgcctctcccgcctcatccgctatatacaccagtgggaggagatctttcacatgacctatgacctggccagtgctgtggttcgcatcttcaacctcattgggatgatgctgctgctatgtcactgggatggctgtctgcagttcctggtgcccatgctgcaggacttccctcccgactgctgggtctccatcaaccacatggtgaaccactcgtggggccgccaatattcccatgccctgttcaaggccatgagccacatgctgtgcattggctatgggcagcaggcacctgtaggcatgcccgacgtctggctcaccatgctcagcatgatcgtgggtgccacatgctacgccatgttcatcggccacgccacggcactcatccagtccctggactcttcccggcgtcagtaccaggagaagtataagcaggtggagcagtacatgtccttccacaagctgccagcagacacgcggcagcgcatccacgagtactatgagcaccgctaccagggcaagatgttcgacgaggaaagcatcctgggcgagctgagcgagccgcttcgggaggagatcattaacttcacctgtcggggcctggtggcccacatgccgctgtttgcccacgccgaccccagcttcgtcactgcagtcctcaccaagctgcgctttgaggtcttccagccgggggacctcgtggtgcgtgagggctccatggggaggaagatgtacttcatccagcatgggttgctcagtgtgctggcccgcggcgcccgggacacacgcctcaccgatggatcctactttggggagatctgcctgctaactaggggccggcgcacagccagtgttcgggctgacacctactgccgcctctactcactcagtgtggaccatttcaacgctgtgctcgaggagttccccatgatgcgccgggcctttgagaccgtggccatggatcggctgcgccgcatcggcaagaagaattccatactgcagcggaagcgctctgagccaagtccaggcagcagtggtggtggcatcatggagcagcacttggtgcaacatgacagagacatggctcgtggtgttcggggtctggccccgagcacaggagctcggctcagtggaaagccagtactgtgggagccactggtacatgcaccccttcaggcagctgctgttacctccaatgtggccattgccctgactcaccagcggggccctctgcccctctcccctgactctccggccaccctccttgctcgctctgctcggcgctcagcagggtctccagcttccccgctggtgcccgtccgagctggcccgtgggcatccacctcccgcctgcccgccccacctgcccgaaccctgcatgccagcctatcccgggcagggtgctcccaggtctccctgctgtgtccccccccaggaggaggtggacggcggctaggacctcgaggccgcccactgtcagcctcccaaccctctctgcctcagcgggcatcaggcgatggctctcctgggcgtaagggatcaggaaatgagcggctgcctccctcagggctcctggccaagcctccaaggacagcccagccccccaggccaccagtgcctgagccagccaccccccggggtctccagctttctgccaacatgtaaaacccttgagtacatccagccttagttcttggggtgcagtagtatgtaccctaaggcagatgcctcttggggaaggccgtggggacctgaaacattgccccatggaaatgtcgaccctgtgcggacattccccatactgccatgaagacggtctcagctcaagaatcctgtagcttgtcccatcataatccattcacccattcatcatgtgtactgagcagctaccatgttcaaggtaatatgccaggcgctgtatgtctccactgccaagtagaagtgactcaaaaccctctgacaagaatattcccctggctatggtcctgccaggtgcaggcccaggcccatgaccccacctttactaagcacaagtacttgccaccgccatcactgccaagtagctagatgtctctgtttccctgccgatgatcctgcaggttctgcctggcctggttatcttcctgttcctgtagcatagccaggcactgccagtcacctgcgcccccattactgccagcagatgtcttgagtcctgagtgtaggtatccacctttacccactcactgccacctgtggacactccgtgcctaccccctgagtgggagcacacttctaagttccctgcagtctctgtcctgtggtagaccatctttttgtaaaccgggaggtgcctctcccctgtaccctctgccccagtcatgcccccctaaaggttaaggagtagttggcacctccttattaatatgccggcctagatccccgctggtggaggggcaaatggctgaatccttgtgagagatttttttctttgcttgtttatttatttattcatttatttaattgtatttattcgtttactaattttatgtgttaccaattcattttgtttacccattcctttatccatccctcccctccttttcagataaggagacaggaggagtaggaggaggcagggcctctccatgccagcctctgtggtcctttcccaaacccatcagcgcaatacttgaaccttctcccaggtaggggcaggaggagccacatgagagagggagaaggactgtgtttacctttagagttttgttttgtttttttccttctgagtttgctgttggtgcaggagtaagggaaaggcccaaggtatccaagcctgggaagggcaggccagccagcacctctgccttctcagggacaagagcagtcctttaccacactcactcactctgtctgtcccctctgctactctacagcattagagactgtggggccaggaccccaagtctcctttccttctgggtggggagttctggggttgttggtgtgtgggagaagttttataattgcttccaaacagctggctttaaatataaaatagacacactca

SEQ ID NO: 80 - RNA, 3882 nt, Macaca fascicularis
  source 1..3882: mol_type = mRNA
tgagtgtgtctattttatatttaaagccagctgtttggaagcaattataaaacttctcccacacaccaacaaccccagaactccccacccagaaggaaaggagacttggggtcctggccccacagtctctaatgctgtagagtagcagaggggacagacagagtgagtgagtgtggtaaaggactgctcttgtccctgagaaggcagaggtgctggctggcctgcccttcccaggcttggataccttgggcctttcccttactcctgcaccaacagcaaactcagaaggaaaaaaacaaaacaaaactctaaaggtaaacacagtccttctccctctctcatgtggctcctcctgcccctacctgggagaaggttcaagtattgcgctgatgggtttgggaaaggaccacagaggctggcatggagaggccctgcctcctcctactcctcctgtctccttatctgaaaaggaggggagggatggataaaggaatgggtaaacaaaatgaattggtaacacataaaattagtaaacgaataaatacaattaaataaatgaataaataaataaacaagcaaagaaaaaaatctctcacaaggattcagccatttgcccctccaccagcggggatctaggccggcatattaataaggaggtgccaactactccttaacctttaggggggcatgactggggcagagggtacaggggagaggcacctcccggtttacaaaaagatggtctaccacaggacagagactgcagggaacttagaagtgtgctcccactcagggggtaggcacggagtgtccacaggtggcagtgagtgggtaaaggtggatacctacactcaggactcaagacatctgctggcagtaatgggggcgcaggtgactggcagtgcctggctatgctacaggaacaggaagataaccaggccaggcagaacctgcaggatcatcggcagggaaacagagacatctagctacttggcagtgatggcggtggcaagtacttgtgcttagtaaaggtggggtcatgggcctgggcctgcacctggcaggaccatagccaggggaatattcttgtcagagggttttgagtcacttctacttggcagtggagacatacagcgcctggcatattaccttgaacatggtagctgctcagtacacatgatgaatgggtgaatggattatgatgggacaagctacaggattcttgagctgagaccgtcttcatggcagtatggggaatgtccgcacagggtcgacatttccatggggcaatgtttcaggtccccacggccttccccaagaggcatctgccttagggtacatactactgcaccccaagaactaaggctggatgtactcaagggttttacatgttggcagaaagctggagaccccggggggtggctggctcaggcactggtggcctggggggctgggctgtccttggaggcttggccaggagccctgagggaggcagccgctcatttcctgatcccttacgcccaggagagccatcgcctgatgcccgctgaggcagagagggttgggaggctgacagtgggcggcctcgaggtcctagccgccgtccacctcctcctggggggggacacagcagggagacctgggagcaccctgcccgggataggctggcatgcagggttcgggcaggtggggcgggcaggcgggaggtggatgcccacgggccagctcggacgggcaccagcggggaagctggagaccctgctgagcgccgagcagagcgagcaaggagggtggccggagagtcaggggagaggggcagagggccccgctggtgagtcagggcaatggccacattggaggtaacagcagctgcctgaaggggtgcatgtaccagtggctcccacagtactggctttccactgagccgagctcctgtgctcggggccagaccccgaacaccacgagccatgtctctgtcatgttgcaccaagtgctgctccatgatgccaccaccactgctgcctggacttggctcagagcgcttccgctgcagtatggaattcttcttgccgatgcggcgcagccgatccatggccacggtctcaaaggcccggcgcatcatggggaactcctcgagcacagcgttgaaatggtccacactgagtgagtagaggcggcagtaggtgtcagcccgaacactggctgtgcgccggcccctagttagcaggcagatctccccaaagtaggatccatcggtgaggcgtgtgtcccgggcgccgcgggccagcacactgagcaacccatgctggatgaagtacatcttcctccccatggagccctcacgcaccacgaggtcccccggctggaagacctcaaagcgcagcttggtgaggactgcagtgacgaagctggggtcggcgtgggcaaacagcggcatgtgggccaccaggccccgacaggtgaagttaatgatctcctcccgaagcggctcgctcagctcgcccaggatgctttcctcgtcgaacatcttgccctggtagcggtgctcatagtactcgtggatgcgctgccgcgtgtctgctggcagcttgtggaaggacatgtactgctccacctgcttatacttctcctggtactgacgccgggaagagtccagggactggatgagtgccgtggcgtggccgatgaacatggcgtagcatgtggcacccacgatcatgctgagcatggtgagccagacgtcgggcatgcctacaggtgcctgctgcccatagccaatgcacagcatgtggctcatggccttgaacagggcatgggaatattggcggccccacgagtggttcaccatgtggttgatggagacccagcagtcgggagggaagtcctgcagcatgggcaccaggaactgcagacagccatcccagtgacatagcagcagcatcatcccaatgaggttgaagatgcgaaccacagcactggccaggtcataggtcatgtgaaagatctcctcccactggtgtatatagcggatgaggcgggagaggcggagcagccgcagcaggcttaggatcttggtgaagcgaacgatgcgtagggcccgtgccgttttgtagacctcagcgtccaactgtggctccagctccaccaccaggaagatgtaatccacagggatagaagagatgaggtcaaccaggaaccaggtgcgcaggtagcgcgtgcggatggcccgcggtgctagcaggatctcagcaccctcctccaccacaatgcccgttcggaagttgagcaccagatccagtaggaagaaagtatcagacaatacgttgaagacgatccaaggcggggagttctcctccttgaagaaggtgatacccacaggcaggacgatgaggttccccaccatcagcagcagcatgatcaggtcccagtaaaaccggaagtcgctgtaagggtggatgatccaggcccccgctgacttcactctctcctgctcgatttccactgctttgtggctgccgaacacccgaagggagaacttgttgaccgtaggttggagcagcgtcccaaggtgccttctcttaggctcagactcagatccggggatcggacctgaggccgcggtcgcaggccggggagcaacgggaggcaccttgggggcctccagcccaggggtcgccccttcgctggcccccgcaaccggcccctgctccgcctccatggcgcccaccccgcttacacgctccgcctcctagagccctatgtggccatcaggtacccccaacccctccagagtgggagtcggcgcagccccgcgggttccagcggaggcgtcgtaggctcggaaccgccggcgcgcggggcggagggggtgtgcgctagact

SEQ ID NO: 81 - RNA, 2910 nt, Homo sapiens
  source 1..2910: mol_type = mRNA
agagaggggcggctgaaggttgcatctgctggaaggaggcttttcggctgcttggtaacgggctgccagaagagagagaggcagagagcagggcagcggcttcttgacgtcagggccaagcgaggggatcgcgccagcaaccccagctctccccagagaggggccggccgaccgctggagcggagcctgacgccaggcgcccgcggagcgtgagtagggggcgcgggagccggtcagctggggcgcagcatgccctctgctcccgcgccatggagatcgccctggtgcccctggagaacggcggtgccatgaccgtcagaggaggcgatgaggcccgggcaggctgcggccaggccacagggggagagctccagtgtcccccgacggctgggctcagcgatgggcccaaggagccggcgccaaaggggcgcggcgcgcagagagacgcggactcgggagtgcggcccttgcctccgctgccggacccgggagtgcggcccttgcctccgctgccagaggagctgccacggcctcgacggccgcctcccgaggacgaggaggaagaaggcgatcccggcctgggcacggtggaggaccaggctctgggcacggcgtccctgcaccaccagcgcgtccacatcaacatctccgggctgcgctttgagacgcagctgggcaccctggcgcagttccccaacacactcctgggggaccccgccaagcgcctgcgctacttcgaccccctgaggaacgagtacttcttcgaccgcaaccggcccagcttcgacggtatcctctactactaccagtccgggggccgcctgcggaggccggtcaacgtctccctggacgtgttcgcggacgagatacgcttctaccagctgggggacgaggccatggagcgcttccgcgaggatgagggcttcattaaagaagaggagaagcccctgccccgcaacgagttccagcgccaggtgtggcttatcttcgagtatccggagagctctgggtccgcgcgggccatcgccatcgtctcggtcttggttatcctcatctccatcatcaccttctgcttggagaccctgcctgagttcagggatgaacgtgagctgctccgccaccctccggcgccccaccagcctcccgcgcccgcccctggggccaacggcagcggggtcatggccccgccctctggccctacggtggcaccgctcctgcccaggaccctggccgaccccttcttcatcgtggagaccacgtgcgtcatctggttcaccttcgagctgctcgtgcgcttcttcgcctgccccagcaaggcagggttctcccggaacatcatgaacatcatcgatgtggtggccatcttcccctacttcatcaccctgggcaccgaactggcagagcagcagccagggggtggaggaggcggccagaatgggcagcaggccatgtccctggccatcctccgagtcatccgcctggtccgggtgttccgcatcttcaagctctcccgccactccaaggggctgcagatcctgggcaagaccttgcaggcctccatgagggagctggggctgctcatcttcttcctcttcatcggggtcatcctcttctccagtgccgtctacttcgcagaggctgacaaccagggaacccatttctctagcatccctgacgccttctggtgggcagtggtcaccatgaccactgtgggctacggggacatgaggcccatcactgttgggggcaagatcgtgggctcgctgtgtgccatcgccggggtcctcaccattgccctgcctgtgcccgtcatcgtctccaacttcaactacttctaccaccgggaaacggatcacgaggagccggcagtccttaaggaagagcagggcactcagagccaggggccggggctggacagaggagtccagcggaaggtcagcgggagcaggggatccttctgcaaggctggggggaccctggagaatgcagacagtgcccgaaggggcagctgccccctagagaagtgtaacgtcaaggccaagagcaacgtggacttgcggaggtccctttatgccctctgcctggacaccagccgggaaacagatttgtgaaaggagattcaggcagactggtggcagtggagtagggaatgggaggcttgctgaacatggatatctacattataccgcagagtatttgaagtcacactgtaacctcagtctacccctctcctttcactcctttcctccctccctcgatccccccattttctctattctttccatgacacccaagggtcgcctatttttaaaaagtaccacattccatgacgcaggagctgtggaaatggtgagcgctgtgagatggatgtatttgtagccagtctcctatacccagcagagggataacccaaacaaaaatgactctaaatagcccagatcccaagagattatgtaactcctccatccatgtgttccaaatttgctttacatatgattgtatttgtgtataggggaaaatattatttttatgcctggtaagtggctttttgtactgtagttcagatagagatattttgggtatattttcaagatacatgttgtatttatggaagaaagagttgtcctgatgtttttctgtgttacttatattagagtcagagatcttggtatgggctgttctgtttcctgtgtctccaagcctctgtcttttctgggatgtggtattggtgctttgtgtctagggcagagtatgttcttgaagaaaggcaaatctgactttttctgtgcgccttaaacaattcttgtaactttcttcaaaaagcattttaatgatattggaggaatacttctgataatttattgtctttatttttatcccaggaaataaaaggttaccttgttgaggcaa

SEQ ID NO: 82 - RNA, 2910 nt, Homo sapiens
  source 1..2910: mol_type = mRNA
ttgcctcaacaaggtaaccttttatttcctgggataaaaataaagacaataaattatcagaagtattcctccaatatcattaaaatgctttttgaagaaagttacaagaattgtttaaggcgcacagaaaaagtcagatttgcctttcttcaagaacatactctgccctagacacaaagcaccaataccacatcccagaaaagacagaggcttggagacacaggaaacagaacagcccataccaagatctctgactctaatataagtaacacagaaaaacatcaggacaactctttcttccataaatacaacatgtatcttgaaaatatacccaaaatatctctatctgaactacagtacaaaaagccacttaccaggcataaaaataatattttcccctatacacaaatacaatcatatgtaaagcaaatttggaacacatggatggaggagttacataatctcttgggatctgggctatttagagtcatttttgtttgggttatccctctgctgggtataggagactggctacaaatacatccatctcacagcgctcaccatttccacagctcctgcgtcatggaatgtggtactttttaaaaataggcgacccttgggtgtcatggaaagaatagagaaaatggggggatcgagggagggaggaaaggagtgaaaggagaggggtagactgaggttacagtgtgacttcaaatactctgcggtataatgtagatatccatgttcagcaagcctcccattccctactccactgccaccagtctgcctgaatctcctttcacaaatctgtttcccggctggtgtccaggcagagggcataaagggacctccgcaagtccacgttgctcttggccttgacgttacacttctctagggggcagctgccccttcgggcactgtctgcattctccagggtccccccagccttgcagaaggatcccctgctcccgctgaccttccgctggactcctctgtccagccccggcccctggctctgagtgccctgctcttccttaaggactgccggctcctcgtgatccgtttcccggtggtagaagtagttgaagttggagacgatgacgggcacaggcagggcaatggtgaggaccccggcgatggcacacagcgagcccacgatcttgcccccaacagtgatgggcctcatgtccccgtagcccacagtggtcatggtgaccactgcccaccagaaggcgtcagggatgctagagaaatgggttccctggttgtcagcctctgcgaagtagacggcactggagaagaggatgaccccgatgaagaggaagaagatgagcagccccagctccctcatggaggcctgcaaggtcttgcccaggatctgcagccccttggagtggcgggagagcttgaagatgcggaacacccggaccaggcggatgactcggaggatggccagggacatggcctgctgcccattctggccgcctcctccaccccctggctgctgctctgccagttcggtgcccagggtgatgaagtaggggaagatggccaccacatcgatgatgttcatgatgttccgggagaaccctgccttgctggggcaggcgaagaagcgcacgagcagctcgaaggtgaaccagatgacgcacgtggtctccacgatgaagaaggggtcggccagggtcctgggcaggagcggtgccaccgtagggccagagggcggggccatgaccccgctgccgttggccccaggggcgggcgcgggaggctggtggggcgccggagggtggcggagcagctcacgttcatccctgaactcaggcagggtctccaagcagaaggtgatgatggagatgaggataaccaagaccgagacgatggcgatggcccgcgcggacccagagctctccggatactcgaagataagccacacctggcgctggaactcgttgcggggcaggggcttctcctcttctttaatgaagccctcatcctcgcggaagcgctccatggcctcgtcccccagctggtagaagcgtatctcgtccgcgaacacgtccagggagacgttgaccggcctccgcaggcggcccccggactggtagtagtagaggataccgtcgaagctgggccggttgcggtcgaagaagtactcgttcctcagggggtcgaagtagcgcaggcgcttggcggggtcccccaggagtgtgttggggaactgcgccagggtgcccagctgcgtctcaaagcgcagcccggagatgttgatgtggacgcgctggtggtgcagggacgccgtgcccagagcctggtcctccaccgtgcccaggccgggatcgccttcttcctcctcgtcctcgggaggcggccgtcgaggccgtggcagctcctctggcagcggaggcaagggccgcactcccgggtccggcagcggaggcaagggccgcactcccgagtccgcgtctctctgcgcgccgcgcccctttggcgccggctccttgggcccatcgctgagcccagccgtcgggggacactggagctctccccctgtggcctggccgcagcctgcccgggcctcatcgcctcctctgacggtcatggcaccgccgttctccaggggcaccagggcgatctccatggcgcgggagcagagggcatgctgcgccccagctgaccggctcccgcgccccctactcacgctccgcgggcgcctggcgtcaggctccgctccagcggtcggccggcccctctctggggagagctggggttgctggcgcgatcccctcgcttggccctgacgtcaagaagccgctgccctgctctctgcctctctctcttctggcagcccgttaccaagcagccgaaaagcctccttccagcagatgcaaccttcagccgcccctctct

SEQ ID NO: 83 - RNA, 3032 nt, Mus musculus
  source 1..3032: mol_type = mRNA
tggggccccagctgaaccctccagagagacactctctgactccgtccccagaggagaaacaggagggggaggaggagaggagggagccacagagggcggaggccggggagctcagccagagaggggctgctggaggttgcatctgctggaaggaggtttttctgctgcctggtaaccagctgccagaacactgagagggagagagagaggcagggagcaggggcagcagcttcttgacgtcaggaccagccaaggggatccagccagctaccccagccagcctagagccagcgggggccctcggctgaagaggaaaccgcgaggcgcggagcgtgagttggggtgtgggaaccggttgtctgggggcgcagcatgccccttgcccccgggccatggagatctccctggtgcccatggagaacggcagtgccatgaccctcagaggaggaggggaggcaggggcaagctgtgtgcagagccccaggggagagtgtgggtgccctccgacggctggactcaataatcagtccaaagaaacatcaccgaggaggcgcgccacacacgaggatgcgggccagggtgggaggcctttgccccctatgcctcaggagctgccacagcctagaaggccatctgctgaggatgaggagggagaaggcgaccctggcctgggcacagtggaggaggaccaggctcctcaggactcaggatcactccatcaccagcgggtcctcataaacatctcgggtttgcgctttgagacgcagctgggcaccctggcgcagtttcccaacaccctcctgggggacccagtcaaacgcctgcgctacttcgatcccttgagaaatgagtacttcttcgaccgcaaccggcctagcttcgatggcattttgtactactaccagtctgggggccgcctgcgcaggccggtcaatgtctccctggatgtgtttgcagatgagatccgcttttaccagctgggggacgaggccatggagcgcttccgggaggatgaaggcttcatcaaggaagaggagaagcccctgccccgcaatgagttccagcgccaggtgtggcttatcttcgaatacccagaaagctctgggtcagcaagagccattgccatcgtgtcggtcttggtcattctcatctctatcatcaccttctgcttggagactctgcctgagttcagggatgaacgggagctgttacgccaccccccagtgccgccgcagcccccagcccctgccccaggggcaaatggcagtggctctggtgtcctttcctctggccccacagtggctccgctcctgcctaggacactggctgacccattcttcatcgtggagaccacatgtgtgatctggttcacttttgagctgcttgtgcgtttctttgcttgccccagcaaggcagaattctctcggaatattatgaacatcattgatattgtggccatcttcccctactttatcaccctgggcaccgagctggcagagcaacaaccagggggtggtggtcagaatgggcagcaggccatgtccctagccatcctcagggtgatccgcctggtccgggtgttccgaatcttcaagctctcccgccactccaagggactgcagatcctgggtaagaccttacaggcgtccatgcgggagctcgggctgctcatcttcttcctcttcatcggagtcatcctcttctccagcgctgtctacttcgcagaggcagacaatcaggggtcgcacttctccagtatcccggatgcattctggtgggcagtagtcactatgaccactgtaggctacggggacatgaggcccatcactgtagggggcaagattgtgggctcactgtgcgccatagctggggtcctcaccattgctctgcctgtgcccgtcatcgtctccaattttaattacttctatcatcgggagacagaccacgaggagcaggctgccctgaaggaagagcaaggcatccagaggcgggagtctgggctggacacaggaggtcaacggaaggtcagctgcagcaaggcctccttctgcaagactgggggacccctggagagtactgacagtatcagaaggggtagctgtcctctagaaaagtgtcacctaaaggccaagagcaacgtggacctgcgaaggtctctgtatgccctctgtctggacactagccgggaaacagatttgtaaagagagatcaaggcagacttgcaacagcagagctgggaaccggttcctcttgagcttgcttatctgctttacaccatagagtatttaagcccacctggtcacccatcaaagtccggatcctgtctttccccgtttacccttcccaccctcctgccctctaacttccccatccccccccctttccataacaccaagggtcacctatttttaaaaagtatcgcattccatgacgcaggagccgttgaagtggtgagcattcactgtaagatggatgtattcatagccagttttctatacccagcagagggataactcaaacaaaattgactttaaatagctcagatcccaagagagtccatagccctctctattcctgtgttccaaatttactttacacgtgattatatttgtatatggcaaatattattcttatggctgacgagtgcattttgtacagcagtgcacatgaagaatatttgggtgtgttcttaagatgtactttgaattatgaagtcttggggggggtcatcatttcctgggacaacccaggggcagagacactaaagaagttgttcaagtttgtgttcccaagcctcccattattctgggatgtactattggtgctttgtgtctaaggtagagaatgttctagaagagcagcaaacctgcttttttttttattccccttaaacatatcctgtgactttcttcacagaagcattttaaggatgttggaagaaggcttttgagaattcattcttttcattttgatagcaggaaataaaatgtgactctgtcgggcaaaaaaaaaaaaaaaaaaaaaaaaaaaaa

SEQ ID NO: 84 - RNA, 3032 nt, Mus musculus
  source 1..3032: mol_type = mRNA
tttttttttttttttttttttttttttttgcccgacagagtcacattttatttcctgctatcaaaatgaaaagaatgaattctcaaaagccttcttccaacatccttaaaatgcttctgtgaagaaagtcacaggatatgtttaaggggaataaaaaaaaaagcaggtttgctgctcttctagaacattctctaccttagacacaaagcaccaatagtacatcccagaataatgggaggcttgggaacacaaacttgaacaacttctttagtgtctctgcccctgggttgtcccaggaaatgatgaccccccccaagacttcataattcaaagtacatcttaagaacacacccaaatattcttcatgtgcactgctgtacaaaatgcactcgtcagccataagaataatatttgccatatacaaatataatcacgtgtaaagtaaatttggaacacaggaatagagagggctatggactctcttgggatctgagctatttaaagtcaattttgtttgagttatccctctgctgggtatagaaaactggctatgaatacatccatcttacagtgaatgctcaccacttcaacggctcctgcgtcatggaatgcgatactttttaaaaataggtgacccttggtgttatggaaagggggggggatggggaagttagagggcaggagggtgggaagggtaaacggggaaagacaggatccggactttgatgggtgaccaggtgggcttaaatactctatggtgtaaagcagataagcaagctcaagaggaaccggttcccagctctgctgttgcaagtctgccttgatctctctttacaaatctgtttcccggctagtgtccagacagagggcatacagagaccttcgcaggtccacgttgctcttggcctttaggtgacacttttctagaggacagctaccccttctgatactgtcagtactctccaggggtcccccagtcttgcagaaggaggccttgctgcagctgaccttccgttgacctcctgtgtccagcccagactcccgcctctggatgccttgctcttccttcagggcagcctgctcctcgtggtctgtctcccgatgatagaagtaattaaaattggagacgatgacgggcacaggcagagcaatggtgaggaccccagctatggcgcacagtgagcccacaatcttgccccctacagtgatgggcctcatgtccccgtagcctacagtggtcatagtgactactgcccaccagaatgcatccgggatactggagaagtgcgacccctgattgtctgcctctgcgaagtagacagcgctggagaagaggatgactccgatgaagaggaagaagatgagcagcccgagctcccgcatggacgcctgtaaggtcttacccaggatctgcagtcccttggagtggcgggagagcttgaagattcggaacacccggaccaggcggatcaccctgaggatggctagggacatggcctgctgcccattctgaccaccaccccctggttgttgctctgccagctcggtgcccagggtgataaagtaggggaagatggccacaatatcaatgatgttcataatattccgagagaattctgccttgctggggcaagcaaagaaacgcacaagcagctcaaaagtgaaccagatcacacatgtggtctccacgatgaagaatgggtcagccagtgtcctaggcaggagcggagccactgtggggccagaggaaaggacaccagagccactgccatttgcccctggggcaggggctgggggctgcggcggcactggggggtggcgtaacagctcccgttcatccctgaactcaggcagagtctccaagcagaaggtgatgatagagatgagaatgaccaagaccgacacgatggcaatggctcttgctgacccagagctttctgggtattcgaagataagccacacctggcgctggaactcattgcggggcaggggcttctcctcttccttgatgaagccttcatcctcccggaagcgctccatggcctcgtcccccagctggtaaaagcggatctcatctgcaaacacatccagggagacattgaccggcctgcgcaggcggcccccagactggtagtagtacaaaatgccatcgaagctaggccggttgcggtcgaagaagtactcatttctcaagggatcgaagtagcgcaggcgtttgactgggtcccccaggagggtgttgggaaactgcgccagggtgcccagctgcgtctcaaagcgcaaacccgagatgtttatgaggacccgctggtgatggagtgatcctgagtcctgaggagcctggtcctcctccactgtgcccaggccagggtcgccttctccctcctcatcctcagcagatggccttctaggctgtggcagctcctgaggcatagggggcaaaggcctcccaccctggcccgcatcctcgtgtgtggcgcgcctcctcggtgatgtttctttggactgattattgagtccagccgtcggagggcacccacactctcccctggggctctgcacacagcttgcccctgcctcccctcctcctctgagggtcatggcactgccgttctccatgggcaccagggagatctccatggcccgggggcaaggggcatgctgcgcccccagacaaccggttcccacaccccaactcacgctccgcgcctcgcggtttcctcttcagccgagggcccccgctggctctaggctggctggggtagctggctggatccccttggctggtcctgacgtcaagaagctgctgcccctgctccctgcctctctctctccctctcagtgttctggcagctggttaccaggcagcagaaaaacctccttccagcagatgcaacctccagcagcccctctctggctgagctccccggcctccgccctctgtggctccctcctctcctcctccccctcctgtttctcctctggggacggagtcagagagtgtctctctggagggttcagctggggcccca

SEQ ID NO: 85 - RNA, 1809 nt, Rattus norvegicus
  source 1..1809: mol_type = mRNA
atggagatctccctggtgcccctggagaatggcagtgccatgaccctcagaggaggaggggaggcaggggcaagctgtgtgcagacccccaggggagagtgtgggtgccctccgacgtctggactcaataatcagtccaaagaaacactgttgagggggcgcacaacgctcgaggatgcgaaccagggtggacggcctttgccccctatggctcaggagctgccacaacctagaaggctatctgctgaggatgaggagggagaaggcgaccctggcctgggcacagtggaggaggaccaggctcctcaggatgcagggtcactccatcaccagcgagtcctcataaacatctccgggttgcgtttcgagacgcagctgggcaccctggcacagtttcccaacaccctcctgggggacccagccaagcgcctgcactacttcgaccccttgagaaatgaatacttcttcgaccgcaaccggcccagcttcgatggcattttgtactactaccagtctgggggccgcctgcgcaggcccgtcaatgtctccctggatgtgtttgcagatgagatccgcttttaccagctgggggacgaggccatggagcgcttccgggaggatgagggcttcatcaaggaagaggagaagcccctgccccgcaacgagttccagcgccaggtatggcttatcttcgaatacccagaaagctctgggtccgcaagagccatcgccatagtgtcggtcctggtcattctcatctctatcatcaccttctgcctggagactctgcctgagttcagggatgagcgggagctgctacgccatcccccagtgccgccccagcccccagcccctgcccctgggatcaatggcagcgtctctggagcactttcctctggccctacggtggctccactcttgcctaggacactggccgatccattcttcatcgtggagaccacatgtgtgatctggttcacttttgagttgctcgtgcgcttctttgcctgccccagcaaggcagaattctctcggaatatcatgaacatcatcgatgtcgtggccatcttcccctactttatcaccctgggcaccgagctggcagagcaacaaccagggggagggggtcagaatgggcagcaggccatgtccctagccatcctcagggtgatccgcctggtgcgggtgtttcggatcttcaagctctcccgccactccaagggactgcagatcctgggtaagaccttgcaagcatccatgcgggaactcgggctactcatcttcttcctcttcattggagtcatcctcttctccagcgctgtctacttcgcagaggcagacaatcacgggtcccatttctctagtatcccagatgccttctggtgggcagtagtcactatgaccactgtaggctatggagacatgagacccatcactgtagggggcaagatcgtgggttcactgtgcgccatagctggggtcctcaccattgccctgcctgtccccgtcatcgtctccaactttaattacttctatcatcgggagacagaccacgaggagcaggctgccctgaaggaagaacaaggcaaccagaggcgggagtctgggctggacacagggggtcaacggaaggtcagctgcagcaaggcctccttttgcaagactgggggttccctggagagttctgacagtatcagaaggggtagctgtcctctagaaaagtgtcacctcaaggccaagagcaacgtggacttgcggaggtccctgtatgccctctgtctggacactagccgtgaaacagatttgtaa

SEQ ID NO: 86 - RNA, 1809 nt, Rattus norvegicus
  source 1..1809: mol_type = mRNA
ttacaaatctgtttcacggctagtgtccagacagagggcatacagggacctccgcaagtccacgttgctcttggccttgaggtgacacttttctagaggacagctaccccttctgatactgtcagaactctccagggaacccccagtcttgcaaaaggaggccttgctgcagctgaccttccgttgaccccctgtgtccagcccagactcccgcctctggttgccttgttcttccttcagggcagcctgctcctcgtggtctgtctcccgatgatagaagtaattaaagttggagacgatgacggggacaggcagggcaatggtgaggaccccagctatggcgcacagtgaacccacgatcttgccccctacagtgatgggtctcatgtctccatagcctacagtggtcatagtgactactgcccaccagaaggcatctgggatactagagaaatgggacccgtgattgtctgcctctgcgaagtagacagcgctggagaagaggatgactccaatgaagaggaagaagatgagtagcccgagttcccgcatggatgcttgcaaggtcttacccaggatctgcagtcccttggagtggcgggagagcttgaagatccgaaacacccgcaccaggcggatcaccctgaggatggctagggacatggcctgctgcccattctgaccccctccccctggttgttgctctgccagctcggtgcccagggtgataaagtaggggaagatggccacgacatcgatgatgttcatgatattccgagagaattctgccttgctggggcaggcaaagaagcgcacgagcaactcaaaagtgaaccagatcacacatgtggtctccacgatgaagaatggatcggccagtgtcctaggcaagagtggagccaccgtagggccagaggaaagtgctccagagacgctgccattgatcccaggggcaggggctgggggctggggcggcactgggggatggcgtagcagctcccgctcatccctgaactcaggcagagtctccaggcagaaggtgatgatagagatgagaatgaccaggaccgacactatggcgatggctcttgcggacccagagctttctgggtattcgaagataagccatacctggcgctggaactcgttgcggggcaggggcttctcctcttccttgatgaagccctcatcctcccggaagcgctccatggcctcgtcccccagctggtaaaagcggatctcatctgcaaacacatccagggagacattgacgggcctgcgcaggcggcccccagactggtagtagtacaaaatgccatcgaagctgggccggttgcggtcgaagaagtattcatttctcaaggggtcgaagtagtgcaggcgcttggctgggtcccccaggagggtgttgggaaactgtgccagggtgcccagctgcgtctcgaaacgcaacccggagatgtttatgaggactcgctggtgatggagtgaccctgcatcctgaggagcctggtcctcctccactgtgcccaggccagggtcgccttctccctcctcatcctcagcagatagccttctaggttgtggcagctcctgagccatagggggcaaaggccgtccaccctggttcgcatcctcgagcgttgtgcgccccctcaacagtgtttctttggactgattattgagtccagacgtcggagggcacccacactctcccctgggggtctgcacacagcttgcccctgcctcccctcctcctctgagggtcatggcactgccattctccaggggcaccagggagatctccat

SEQ ID NO: 87 - RNA, 3032 nt, Macaca mulatta
  source 1..3032: mol_type = mRNA
accagctgcgcccttcggggagacactggctgccacaagacccgggaggcgaagcgggaggagggggaggggaagcaggaggagggggaagggagaggggaaggcgggggaggcgccgagggtggaggccaagcgcagcgcagccagagagggacggctgaaggttgcatctgctggaaggaggcttttcggctgcttggtaacgggctgccagaagagagagaggcagagagcagggcagcggcttcttgacgtcagggccaagcgaggggatcgcgccagcaaccccagctcgccccagagaggggccggccgaccgcgggagcggagcctgacgggaggtgcccggggagcgtgagtagggggcgcgggagcaggtcagctggggcgcagcatgcccgctgctcccgcgccatggagatcgccctggtgcccctggagaacggcggtgccatgaccgtcagaggaggcgatgaggcccgggcaggctgcggccaggccacagggggagagctccagtgtcccccgacggctgggctcagcgatgggcccaaggagccggcgccaaaggggcgcggcgcgcagagagacgcggacccgggagtgcggcccttgcctccgctgcccaaggagctgccacagcctcgacggccgcctcccgaggacgaggaggaagaaggcgaccccggcctgggcacggtggaggaccaggctctgggcacgtcgtccctgcaccaccagcgcgtccacatcaacatctccgggctgcgcttcgagacgcagctgggcaccctggcgcagttccccaacaccctcctgggcgaccccgccaagcgcctgcgctacttcgaccccctgaggaacgagtacttcttcgaccgcaaccggcccagcttcgacggtatcctctactactaccagtcggggggccgcctgcggaggccggtcaacgtctccctggacgtgttcgcggacgagatccgcttctaccagctgggggacgaggccatggagcgcttccgcgaggatgagggtttcattaaagaagaggagaagcccctgccccgcaacgagttccagcgccaggtgtggcttatcttcgagtatccggagagctctgggtccgcgcgggccatcgccatcgtctcggtcttggtcatcctcatctccatcatcaccttctgcttggagaccctgcccgagttcagggatgaacgcgagctgctccgccaccccccagcgccccaccagcctcccgcgcccgcccctgggaccaacggcagcggggtcatggccccgccctctggccctacggtggcaccgctcctgcccaggaccctggccgaccccttcttcatcgtggagaccacgtgcgtcatctggttcaccttcgagctgctcgtgcgcttcttcgcctgccccagcaaggcagggttctcccggaacatcatgaacatcatcgatgtggtggccatcttcccttacttcatcaccctgggcaccgagctggcagagcaacagccagggggcggaggaggcagccagaatgggcagcaggccatgtccctggccatcctcagagtcatccgcctggtccgggtgttccgcatcttcaagctctcccgccactccaaggggctgcagatcctgggcaagaccttgcaggcctccatgagggagctggggttgctcatcttcttcctgttcatcggggtcatcctcttctccagtgccgtctacttcgcagaggctgacaaccaggggacccatttctctagcatccctgatgccttctggtgggcagtggtcaccatgaccactgtgggctacggggacatgaggcccatcaccgtggggggcaagatcgtgggctcgctgtgtgccatcgccggggtcctcaccattgccctgcctgtgcccgtcattgtctccaacttcaactacttctaccaccgggagacggaccacgaggagccggcagtccttaaggaagagcagggccctcagagccaggggccggggctggacagaggagtccagcggaaggtccaggagtccagcgggagcaggggatccttctgcaaggccggggggaccctggagaatgcagacagtgcccgaaggagcagctgccccctagagaagtgtaacgtcaaggccaagagcaacgtggacttgcggaggtccctttatgccctctgcctggacaccagccgggaaacagatttgtaaaaggagattcaggcagactggtggcagtggggtagggaatggaaggcttgctgaacatggatatttacattataccgcagagtatttgaagtcacactgtaacctcagtctacccctctcctttcactcctttcctccctccctcaatccccccattttctctcttctttccatgacacccaagggtcacctatttttaaaaagtaccacattccatgacgcaggagctgttgaaatggtaagcgctgtgagatggatgtatttgtagccagtctcctataccccgcagagggataacccaaacaaaaatgactctaaatagcccagatcccaagagattacgtaactcctccatccatgtgttccaaatttgctttacatatgattacatttgtgtataggggaaaatattatttttatgcctggtaagtggctttttgtactgtagtttagatagagatattttggatatattttcaagatacatgttgtatttatggaagaaagagttgtcctgatgtttttctgtgatacttatattagagccagagatcttggtatgggctgttctggttcctgtgtctccaagcctctgtcttttcccggatgtggtattggtgctttgtgtctagggcagagaatgttcttgaagaaaggcaaatctgactttttctgtgcgccttaaacaattcttgtaactttcttcaaaaagcatttgaatgatattggaggaatacttctgataatttattctctttatttttaatcccaggaaataaaaggttaccttgttgaggcaa

SEQ ID NO: 88 - RNA, 3032 nt, Macaca mulatta
  source 1..3032: mol_type = mRNA
ttgcctcaacaaggtaaccttttatttcctgggattaaaaataaagagaataaattatcagaagtattcctccaatatcattcaaatgctttttgaagaaagttacaagaattgtttaaggcgcacagaaaaagtcagatttgcctttcttcaagaacattctctgccctagacacaaagcaccaataccacatccgggaaaagacagaggcttggagacacaggaaccagaacagcccataccaagatctctggctctaatataagtatcacagaaaaacatcaggacaactctttcttccataaatacaacatgtatcttgaaaatatatccaaaatatctctatctaaactacagtacaaaaagccacttaccaggcataaaaataatattttcccctatacacaaatgtaatcatatgtaaagcaaatttggaacacatggatggaggagttacgtaatctcttgggatctgggctatttagagtcatttttgtttgggttatccctctgcggggtataggagactggctacaaatacatccatctcacagcgcttaccatttcaacagctcctgcgtcatggaatgtggtactttttaaaaataggtgacccttgggtgtcatggaaagaagagagaaaatggggggattgagggagggaggaaaggagtgaaaggagaggggtagactgaggttacagtgtgacttcaaatactctgcggtataatgtaaatatccatgttcagcaagccttccattccctaccccactgccaccagtctgcctgaatctccttttacaaatctgtttcccggctggtgtccaggcagagggcataaagggacctccgcaagtccacgttgctcttggccttgacgttacacttctctagggggcagctgctccttcgggcactgtctgcattctccagggtccccccggccttgcagaaggatcccctgctcccgctggactcctggaccttccgctggactcctctgtccagccccggcccctggctctgagggccctgctcttccttaaggactgccggctcctcgtggtccgtctcccggtggtagaagtagttgaagttggagacaatgacgggcacaggcagggcaatggtgaggaccccggcgatggcacacagcgagcccacgatcttgccccccacggtgatgggcctcatgtccccgtagcccacagtggtcatggtgaccactgcccaccagaaggcatcagggatgctagagaaatgggtcccctggttgtcagcctctgcgaagtagacggcactggagaagaggatgaccccgatgaacaggaagaagatgagcaaccccagctccctcatggaggcctgcaaggtcttgcccaggatctgcagccccttggagtggcgggagagcttgaagatgcggaacacccggaccaggcggatgactctgaggatggccagggacatggcctgctgcccattctggctgcctcctccgccccctggctgttgctctgccagctcggtgcccagggtgatgaagtaagggaagatggccaccacatcgatgatgttcatgatgttccgggagaaccctgccttgctggggcaggcgaagaagcgcacgagcagctcgaaggtgaaccagatgacgcacgtggtctccacgatgaagaaggggtcggccagggtcctgggcaggagcggtgccaccgtagggccagagggcggggccatgaccccgctgccgttggtcccaggggcgggcgcgggaggctggtggggcgctggggggtggcggagcagctcgcgttcatccctgaactcgggcagggtctccaagcagaaggtgatgatggagatgaggatgaccaagaccgagacgatggcgatggcccgcgcggacccagagctctccggatactcgaagataagccacacctggcgctggaactcgttgcggggcaggggcttctcctcttctttaatgaaaccctcatcctcgcggaagcgctccatggcctcgtcccccagctggtagaagcggatctcgtccgcgaacacgtccagggagacgttgaccggcctccgcaggcggccccccgactggtagtagtagaggataccgtcgaagctgggccggttgcggtcgaagaagtactcgttcctcagggggtcgaagtagcgcaggcgcttggcggggtcgcccaggagggtgttggggaactgcgccagggtgcccagctgcgtctcgaagcgcagcccggagatgttgatgtggacgcgctggtggtgcagggacgacgtgcccagagcctggtcctccaccgtgcccaggccggggtcgccttcttcctcctcgtcctcgggaggcggccgtcgaggctgtggcagctccttgggcagcggaggcaagggccgcactcccgggtccgcgtctctctgcgcgccgcgcccctttggcgccggctccttgggcccatcgctgagcccagccgtcgggggacactggagctctccccctgtggcctggccgcagcctgcccgggcctcatcgcctcctctgacggtcatggcaccgccgttctccaggggcaccagggcgatctccatggcgcgggagcagcgggcatgctgcgccccagctgacctgctcccgcgccccctactcacgctccccgggcacctcccgtcaggctccgctcccgcggtcggccggcccctctctggggcgagctggggttgctggcgcgatcccctcgcttggccctgacgtcaagaagccgctgccctgctctctgcctctctctcttctggcagcccgttaccaagcagccgaaaagcctccttccagcagatgcaaccttcagccgtccctctctggctgcgctgcgcttggcctccaccctcggcgcctcccccgccttcccctctcccttccccctcctcctgcttcccctccccctcctcccgcttcgcctcccgggtcttgtggcagccagtgtctccccgaagggcgcagctggt

SEQ ID NO: 89 - RNA, 2913 nt, Macaca fascicularis
  source 1..2913: mol_type = mRNA
gggtggaggccaagcgcagcgcagccagagagggacggctgaaggttgcatctgctggaaggaggcttttcggctgcttggtaacgggctgccagaagagagagaggcagagagcagggcagcggcttcttgacgtcagggccaagcgaggggatcgcgccagcaaccccagctcgccccagagaggggccggccgaccgcgggagcggagcctgacgggaggtgcccggggagcgtgagtagggggcgcgggagcaggtcagctggggcgcagcatgcccgctgctcccgcgccatggagatcgccctggtgcccctggagaacggcggtgccatgaccgtcagaggaggcgatgaggcccgggcaggctgcggccaggccacggggggagagctccagtgtcccccgacggctgggctcagcgatgggcccaaggagccggcgccaaaggggcgcggcgcgcagagagacgcggacccgggagtgcggcccttgcctccgctgcccaaggagctgccacagcctcgacggccgcctcccgaggacgaggaggaagaaggcgaccccggcctgggcacggtggaggaccaggctctgggcacggcgtccctgcaccaccagcgcgtccacatcaacatctccgggctgcgcttcgagacgcagctgggcaccctggcgcagttccccaacaccctcctgggcgaccccgccaagcgcctgcgctacttcgaccccctgaggaacgagtacttcttcgaccgcaaccggcccagcttcgacggtatcctctactactaccagtcggggggccgcctgcggaggccggtcaacgtctccctggacgtgttcgcggacgagatccgcttctaccagctgggggacgaggccatggagcgcttccgcgaggatgagggtttcattaaagaagaggagaagcccctgccccgcaacgagttccagcgccaggtgtggcttatcttcgagtatccggagagctctgggtccgcgcgggccatcgccatcgtctcggtcttggtcatcctcatctccatcatcaccttctgcttggagaccctgcccgagttcagggatgaacgcgagctgctccgccaccccccagcgccccaccagcctcccgcgcccgcccctgggaccaacggcagcggggtcatggccccgccctctggccctacggtggcaccgctcctgcccaggaccctggccgaccccttcttcatcgtggagaccacgtgcgtcatctggttcaccttcgagctgctcgtgcgcttcttcgcctgccccagcaaggcagggttctcccggaacatcatgaacatcatcgatgtggtggccatcttcccttacttcatcaccctgggcaccgagctggcagagcaacagccagggggcggaggaggcagccagaatgggcagcaggccatgtccctggccatcctcagagtcatccgcctggtccgggtgttccgcatcttcaagctctcccgccactccaaggggctgcagatcctgggcaagaccttgcaggcctccatgagggagctggggttgctcatcttcttcctgttcatcggggtcatcctcttctccagtgccgtctacttcgcagaggctgacaaccaggggacccatttctctagcatccctgatgccttctggtgggcagtggtcaccatgaccactgtgggctacggggacatgaggcccgtcaccgtggggggcaagatcgtgggctcgctgtgtgccatcgccggggtcctcaccattgccctgcctgtgcccgtcattgtctccaacttcaactacttctaccaccgggagacggaccacgaggagccggcagtccttaaggaagagcagggccctcagagccaggggccggggctggacagaggagtccagcggaaggtccaggagtccagcgggagcaggggatccttctgcaaggccggggggaccctggagaatgcagacagtgcccgaaggagcagctgccccctagagaagtgtaacgtcaaggccaagagcaacgtggacttgcggaggtccctttatgccctctgcctggacaccagccgggaaacagatttgtaaaaggagattcaggcagactggtggcagtggggtagggaatggaaggcttgctgaacatggatatttacattataccgcagagtatttgaagtcacactgtaacctcagtctacccctctcctttcactcctttcctccctccctcaatccccccattttctctcttctttccatgacacccaagggtcacctatttttaaaaagtaccacattccatgacgcaggagctgttgaaatggtaagcgctgtgagatggatgtatttgtagccagtctcctataccccgcagagggataacccaaacaaaaatgactctaaatagcccagatcccaagagattacgtaactcctccatccatgtgttccaaatttgctttacatatgattacatttgtgtataggggaaaatattatttttatgcctggtaagtggctttttgtactgtagtttagatagagatattttggatatattttcaagatacatgttgtatttatggaagaaagagttgccctgatgtttttctgtgatacttatattagagccagagatcttggtatgggctgttctggttcctgtgtctccaagcctctgtcttttccgggatgtggtattggtgctttgtgtctagggcagagaatgttcttgaagaaaggcaaatctgactttttctgtgcgccttaaacaattcttgtaactttcttcaaaaagcatttgaatggtattggaggaatacttctgataatttattctctttatttttaatcccaggaaataaaaggttaccttgttgaggcaa

SEQ ID NO: 90 - RNA, 2913 nt, Macaca fascicularis
  source 1..2913: mol_type = mRNA
ttgcctcaacaaggtaaccttttatttcctgggattaaaaataaagagaataaattatcagaagtattcctccaataccattcaaatgctttttgaagaaagttacaagaattgtttaaggcgcacagaaaaagtcagatttgcctttcttcaagaacattctctgccctagacacaaagcaccaataccacatcccggaaaagacagaggcttggagacacaggaaccagaacagcccataccaagatctctggctctaatataagtatcacagaaaaacatcagggcaactctttcttccataaatacaacatgtatcttgaaaatatatccaaaatatctctatctaaactacagtacaaaaagccacttaccaggcataaaaataatattttcccctatacacaaatgtaatcatatgtaaagcaaatttggaacacatggatggaggagttacgtaatctcttgggatctgggctatttagagtcatttttgtttgggttatccctctgcggggtataggagactggctacaaatacatccatctcacagcgcttaccatttcaacagctcctgcgtcatggaatgtggtactttttaaaaataggtgacccttgggtgtcatggaaagaagagagaaaatggggggattgagggagggaggaaaggagtgaaaggagaggggtagactgaggttacagtgtgacttcaaatactctgcggtataatgtaaatatccatgttcagcaagccttccattccctaccccactgccaccagtctgcctgaatctccttttacaaatctgtttcccggctggtgtccaggcagagggcataaagggacctccgcaagtccacgttgctcttggccttgacgttacacttctctagggggcagctgctccttcgggcactgtctgcattctccagggtccccccggccttgcagaaggatcccctgctcccgctggactcctggaccttccgctggactcctctgtccagccccggcccctggctctgagggccctgctcttccttaaggactgccggctcctcgtggtccgtctcccggtggtagaagtagttgaagttggagacaatgacgggcacaggcagggcaatggtgaggaccccggcgatggcacacagcgagcccacgatcttgccccccacggtgacgggcctcatgtccccgtagcccacagtggtcatggtgaccactgcccaccagaaggcatcagggatgctagagaaatgggtcccctggttgtcagcctctgcgaagtagacggcactggagaagaggatgaccccgatgaacaggaagaagatgagcaaccccagctccctcatggaggcctgcaaggtcttgcccaggatctgcagccccttggagtggcgggagagcttgaagatgcggaacacccggaccaggcggatgactctgaggatggccagggacatggcctgctgcccattctggctgcctcctccgccccctggctgttgctctgccagctcggtgcccagggtgatgaagtaagggaagatggccaccacatcgatgatgttcatgatgttccgggagaaccctgccttgctggggcaggcgaagaagcgcacgagcagctcgaaggtgaaccagatgacgcacgtggtctccacgatgaagaaggggtcggccagggtcctgggcaggagcggtgccaccgtagggccagagggcggggccatgaccccgctgccgttggtcccaggggcgggcgcgggaggctggtggggcgctggggggtggcggagcagctcgcgttcatccctgaactcgggcagggtctccaagcagaaggtgatgatggagatgaggatgaccaagaccgagacgatggcgatggcccgcgcggacccagagctctccggatactcgaagataagccacacctggcgctggaactcgttgcggggcaggggcttctcctcttctttaatgaaaccctcatcctcgcggaagcgctccatggcctcgtcccccagctggtagaagcggatctcgtccgcgaacacgtccagggagacgttgaccggcctccgcaggcggccccccgactggtagtagtagaggataccgtcgaagctgggccggttgcggtcgaagaagtactcgttcctcagggggtcgaagtagcgcaggcgcttggcggggtcgcccaggagggtgttggggaactgcgccagggtgcccagctgcgtctcgaagcgcagcccggagatgttgatgtggacgcgctggtggtgcagggacgccgtgcccagagcctggtcctccaccgtgcccaggccggggtcgccttcttcctcctcgtcctcgggaggcggccgtcgaggctgtggcagctccttgggcagcggaggcaagggccgcactcccgggtccgcgtctctctgcgcgccgcgcccctttggcgccggctccttgggcccatcgctgagcccagccgtcgggggacactggagctctccccccgtggcctggccgcagcctgcccgggcctcatcgcctcctctgacggtcatggcaccgccgttctccaggggcaccagggcgatctccatggcgcgggagcagcgggcatgctgcgccccagctgacctgctcccgcgccccctactcacgctccccgggcacctcccgtcaggctccgctcccgcggtcggccggcccctctctggggcgagctggggttgctggcgcgatcccctcgcttggccctgacgtcaagaagccgctgccctgctctctgcctctctctcttctggcagcccgttaccaagcagccgaaaagcctccttccagcagatgcaaccttcagccgtccctctctggctgcgctgcgcttggcctccaccc

SEQ ID NO: 91 - RNA, 4628 nt, Homo sapiens
  source 1..4628: mol_type = mRNA
acctccttattggtgctagtttgcagcgcccagctcctgcgccttcgcttcgcgtttgaatctggctcgccccttcgtattatgtctgcactccgaaggaaatttggggacgattatcaggtagtgaccacatcgtccagcggctcgggcttgcagccccaggggccaggccaggaccctcagcagcagcttgtgcccaagaagaagcggcagcggttcgtggacaagaacggccggtgcaatgtacagcacggcaacctgggcagcgagacaagccgctacctctcggacctcttcaccacgctggtggacctcaagtggcgctggaacctcttcatcttcattctcacctacaccgtggcctggcttttcatggcgtccatgtggtgggtgatcgcctacactcggggcgacctgaacaaagcccacgtcggtaactacacgccttgcgtggccaatgtctataacttcccttctgccttcctcttcttcatcgagacggaggccaccatcggctatggctaccgatacatcacagacaagtgccccgagggcatcatcctcttcctcttccagtccatcctgggctccatcgtggacgccttcctcatcggctgcatgttcatcaagatgtcccagcccaagaagcgcgccgagaccctcatgttcagcgagcacgcggtgatctccatgagggacggaaaactcacgcttatgttccgggtgggcaacctgcgcaacagccacatggtctccgcgcagattcgctgcaagctgctcaaatctcggcagacacctgagggtgagttccttccccttgaccaacttgaactggatgtaggttttagtacaggggcagatcaactttttcttgtgtcccccctcacaatttgccacgtgatcgatgccaaaagccccttttatgacctatcccagcgaagcatgcaaactgaacagttcgagattgtcgtcatcctagaaggcattgtggaaacaactgggatgacttgtcaagctcgaacatcatatactgaagatgaagttctttggggtcatcgtttttttcctgtaatttccttagaagagggattctttaaagttgattactcccagttccatgcaacatttgaagtccccaccccaccttacagtgtgaaagagcaggaggaaatgcttctcatgtcgtcccctttaatagcaccagccataactaacagcaaagaaagacataattctgtggaatgcttagatggactagatgatattactacaaaactaccatctaagctgcagaaaattactggaagagaagactttcccaaaaaactcttgaggatgagttctacaacttcagaaaaagcctacagcttgggagacttgcccatgaaacttcaacgaataagttcagttccgggcaactcagaagaaaaactggtatctaaaaccaccaagatgttatctgatcccatgagccagtctgtggctgatttgccaccaaagcttcaaaagatggctggaggagcagctaggatggaagggaaccttccagccaaattaagaaaaatgaactctgatcgcttcacataacaaagcactcccttaggcattatttaatgtttgatttagtaatagtccaatatttggcgatgaggtaattctccctaaggaatctgaaagtatattttcctcccagttctacaagcatatttgagaacccttcctttcccaagtattgcgaatgtgcagaaagcaacagttacggagggaggacatcataaggaagttattaacgggcatgtattatcacatcaagcatgcaataatgtgcaaattttgcatttagttttatggcatgatttatatatggcatatttatattgtatattctggaaaaaaaatatatatatatatttaaaggggagatactctccctgacatttctaacatatgtattaagccaaacatgagtgaatagctttcagggcgataaaactaaatatatgtctgtgtgtgtgtgtgtatgtatacacacatatacatatatatatacacatacatacacatacatacatacatacatatatatctgataaaattgtgatgttttgttcaaagttgtagttcttgtgcatgtttactttattagagtaggaaggctactggcattaattattaataccaaatattttagccttaaatttttgtcattttaaaatctgatttaatgttttctgctgtttaaggtcttgggaggctttcaattgtattttatatgagagaatcacacaagtttgtgctatctatggccctgcaaaaatataaccattacatgtttaaattgtaaattttagagcataccagtactcagtatagcattgaacatttcttatgatttttaaaagttgctagtactggggagaaataattgttgattaatttgagaattattcctttcctagactaattaaaatctggaaatctgttttgtatatgatctaatacaaagatgagctctgaacaaacactgaatcatgttaatagacagtagccaagttatattgaatatatcagaatctgtgtgaagttacacaattaattgtccctgtttcaaactgagtaaattggaaacattttctttctttttctggaaattttgtccattttaaaaaccaatcattttaagaagacatgacaatgcaatgaaacagatgataaatatttatgcttaaaatatgtatgtctaattgagtctcttttttattctgttttcttgtttatggcatttgttgtaacaggatagactttttcctcacctaggaaacctatcccatgcctgtcacttatagttcaggaggaagtttttgcacagaccagagagaaattaaaattagatgataaattgaagatatcttacacacagttttttggtgaacactgattttattggtgtcttagatccctagtctacccaaataattttaacagtactgttttttctaatcctgaagtctgatatttatgactcattagcaggaatcaaaactagtgatcagtagaacactttcaaaataaaaatttggaatgcagacttttatgaaaatttaaaagtgctccttaacagaatatcatgggttttcctataaaacttctttaagtattgtaattccagtctgccccaactttaaaaaaaattcttattaatatgtcagtcattaattgctagtttgggctctcattatttcctgttttttaacaattttgtgataattttattattggcaaattaatacatcaacacttaaatcattgactataataataccttctggctacctctgtatcaaccaaattctgtaggtgcaaacatataccagggaattcttactggcaaaatgatcaatctggagtgtgcatccactgtgaatggagcaaattgccctatacccattgataacctagctttcttagtttgtagatgtaggaaacaaaatagtgacagagagagaagggggtccacagggcatggtatatttatcagcagtggaaaaaaagtgcatagatcatttagtccaagaacttaaaactaaatagagccataatttactttggagagtcattttaatttgtctttggtaccaaggagaagacggaaccaaaaacaaactctccaagtatattcacacattcaacaaaatttttgcatgccttctatgtcgtaggcatttttagttcctggggatttggacatggctaagtcagagaaggccattgctcaccatgaacactgtataccagaaggagagtggggaggagacaaaaaacaaataagaccacttcagacaatcaaagtatcagttaagagaatgaaaacaggcctgactcagtggctcacgcctgtaatcccagtactttgggaggcggaggttgggggatcacctgaggtcaggagatcgagaccagcctggacaacatggtgaaaacccgtctctactaaaaatacaaaaattaactgggcatggtggcaggcacctgtaatcccagctactggggaagctgaggcaggagaatcgtttgaacctgggaggcggaggttgcagtgagccaagattctgccactgcactccagcctgggtgacagtgcgagactccatctcaacatcaaaaaaaaaaaaaaaaaaaaaaaaaaaaaaaaaaaaaaaaagaataaaaacagggtaacataatgcaaagtaactgtgtggaataaaaattgattattttagaaaatgtgactggcttaggacggggataatatgtgaacagaaatctatctcatgagaaagtgctactgttgtcaaaattaccttatctgagtgaatggtattttttttatcttttccacacatgcgtgggaaaggtatgatttctgcatgtaattgcagtttaacccttatttctaggttgatcataggtcccagtttacccaggaaaattccagtttatacctgttgtacctgtgtaattattggtagcactccctttcactcttacaatgtcttggtttggatgatatatggtgaagtttttgttgaaactaaattatgaagtctgatatatttggataaaaataaagaattgcttttcttctc

SEQ ID NO: 92 - RNA, 4628 nt, Homo sapiens
  source 1..4628: mol_type = mRNA
gagaagaaaagcaattctttatttttatccaaatatatcagacttcataatttagtttcaacaaaaacttcaccatatatcatccaaaccaagacattgtaagagtgaaagggagtgctaccaataattacacaggtacaacaggtataaactggaattttcctgggtaaactgggacctatgatcaacctagaaataagggttaaactgcaattacatgcagaaatcatacctttcccacgcatgtgtggaaaagataaaaaaaataccattcactcagataaggtaattttgacaacagtagcactttctcatgagatagatttctgttcacatattatccccgtcctaagccagtcacattttctaaaataatcaatttttattccacacagttactttgcattatgttaccctgtttttattctttttttttttttttttttttttttttttttttttttttttgatgttgagatggagtctcgcactgtcacccaggctggagtgcagtggcagaatcttggctcactgcaacctccgcctcccaggttcaaacgattctcctgcctcagcttccccagtagctgggattacaggtgcctgccaccatgcccagttaatttttgtatttttagtagagacgggttttcaccatgttgtccaggctggtctcgatctcctgacctcaggtgatcccccaacctccgcctcccaaagtactgggattacaggcgtgagccactgagtcaggcctgttttcattctcttaactgatactttgattgtctgaagtggtcttatttgttttttgtctcctccccactctccttctggtatacagtgttcatggtgagcaatggccttctctgacttagccatgtccaaatccccaggaactaaaaatgcctacgacatagaaggcatgcaaaaattttgttgaatgtgtgaatatacttggagagtttgtttttggttccgtcttctccttggtaccaaagacaaattaaaatgactctccaaagtaaattatggctctatttagttttaagttcttggactaaatgatctatgcactttttttccactgctgataaatataccatgccctgtggacccccttctctctctgtcactattttgtttcctacatctacaaactaagaaagctaggttatcaatgggtatagggcaatttgctccattcacagtggatgcacactccagattgatcattttgccagtaagaattccctggtatatgtttgcacctacagaatttggttgatacagaggtagccagaaggtattattatagtcaatgatttaagtgttgatgtattaatttgccaataataaaattatcacaaaattgttaaaaaacaggaaataatgagagcccaaactagcaattaatgactgacatattaataagaattttttttaaagttggggcagactggaattacaatacttaaagaagttttataggaaaacccatgatattctgttaaggagcacttttaaattttcataaaagtctgcattccaaatttttattttgaaagtgttctactgatcactagttttgattcctgctaatgagtcataaatatcagacttcaggattagaaaaaacagtactgttaaaattatttgggtagactagggatctaagacaccaataaaatcagtgttcaccaaaaaactgtgtgtaagatatcttcaatttatcatctaattttaatttctctctggtctgtgcaaaaacttcctcctgaactataagtgacaggcatgggataggtttcctaggtgaggaaaaagtctatcctgttacaacaaatgccataaacaagaaaacagaataaaaaagagactcaattagacatacatattttaagcataaatatttatcatctgtttcattgcattgtcatgtcttcttaaaatgattggtttttaaaatggacaaaatttccagaaaaagaaagaaaatgtttccaatttactcagtttgaaacagggacaattaattgtgtaacttcacacagattctgatatattcaatataacttggctactgtctattaacatgattcagtgtttgttcagagctcatctttgtattagatcatatacaaaacagatttccagattttaattagtctaggaaaggaataattctcaaattaatcaacaattatttctccccagtactagcaacttttaaaaatcataagaaatgttcaatgctatactgagtactggtatgctctaaaatttacaatttaaacatgtaatggttatatttttgcagggccatagatagcacaaacttgtgtgattctctcatataaaatacaattgaaagcctcccaagaccttaaacagcagaaaacattaaatcagattttaaaatgacaaaaatttaaggctaaaatatttggtattaataattaatgccagtagccttcctactctaataaagtaaacatgcacaagaactacaactttgaacaaaacatcacaattttatcagatatatatgtatgtatgtatgtatgtgtatgtatgtgtatatatatatgtatatgtgtgtatacatacacacacacacacagacatatatttagttttatcgccctgaaagctattcactcatgtttggcttaatacatatgttagaaatgtcagggagagtatctcccctttaaatatatatatatattttttttccagaatatacaatataaatatgccatatataaatcatgccataaaactaaatgcaaaatttgcacattattgcatgcttgatgtgataatacatgcccgttaataacttccttatgatgtcctccctccgtaactgttgctttctgcacattcgcaatacttgggaaaggaagggttctcaaatatgcttgtagaactgggaggaaaatatactttcagattccttagggagaattacctcatcgccaaatattggactattactaaatcaaacattaaataatgcctaagggagtgctttgttatgtgaagcgatcagagttcatttttcttaatttggctggaaggttcccttccatcctagctgctcctccagccatcttttgaagctttggtggcaaatcagccacagactggctcatgggatcagataacatcttggtggttttagataccagtttttcttctgagttgcccggaactgaacttattcgttgaagtttcatgggcaagtctcccaagctgtaggctttttctgaagttgtagaactcatcctcaagagttttttgggaaagtcttctcttccagtaattttctgcagcttagatggtagttttgtagtaatatcatctagtccatctaagcattccacagaattatgtctttctttgctgttagttatggctggtgctattaaaggggacgacatgagaagcatttcctcctgctctttcacactgtaaggtggggtggggacttcaaatgttgcatggaactgggagtaatcaactttaaagaatccctcttctaaggaaattacaggaaaaaaacgatgaccccaaagaacttcatcttcagtatatgatgttcgagcttgacaagtcatcccagttgtttccacaatgccttctaggatgacgacaatctcgaactgttcagtttgcatgcttcgctgggataggtcataaaaggggcttttggcatcgatcacgtggcaaattgtgaggggggacacaagaaaaagttgatctgcccctgtactaaaacctacatccagttcaagttggtcaaggggaaggaactcaccctcaggtgtctgccgagatttgagcagcttgcagcgaatctgcgcggagaccatgtggctgttgcgcaggttgcccacccggaacataagcgtgagttttccgtccctcatggagatcaccgcgtgctcgctgaacatgagggtctcggcgcgcttcttgggctgggacatcttgatgaacatgcagccgatgaggaaggcgtccacgatggagcccaggatggactggaagaggaagaggatgatgccctcggggcacttgtctgtgatgtatcggtagccatagccgatggtggcctccgtctcgatgaagaagaggaaggcagaagggaagttatagacattggccacgcaaggcgtgtagttaccgacgtgggctttgttcaggtcgccccgagtgtaggcgatcacccaccacatggacgccatgaaaagccaggccacggtgtaggtgagaatgaagatgaagaggttccagcgccacttgaggtccaccagcgtggtgaagaggtccgagaggtagcggcttgtctcgctgcccaggttgccgtgctgtacattgcaccggccgttcttgtccacgaaccgctgccgcttcttcttgggcacaagctgctgctgagggtcctggcctggcccctggggctgcaagcccgagccgctggacgatgtggtcactacctgataatcgtccccaaatttccttcggagtgcagacataatacgaaggggcgagccagattcaaacgcgaagcgaaggcgcaggagctgggcgctgcaaactagcaccaataaggaggt

SEQ ID NO: 93 - RNA, 5232 nt, Mus musculus
  source 1..5232: mol_type = mRNA
ctccatccatccgggacaagcaaagggcggacatggaataggagatcgaaggaaggaagactcaaatgtttctattgagaggcatgggaaaagctggagcaaaagccggtgtttaacctgaaagtctgacctccgttcagcagtcgcactgtcgcctggaaagagggcatcgcacgctaaggaacccgggagtcaggcgtccgagtcagtctctgcttggagcatcaggggtttctggcagaggctgtgtagtgtccccagggaggcacggagcctgacacacctgcattggttctcatcttggaacaccaagaaaagtagaaaggggtcaggcaccctaagcgcagggtgcttggccagactgcctgtgctgcttgcagagcctccgcctgttctctgtcactgggtgagtgcccaggcttccagagctccctggagcgcaggggtagcttgacgtccgctcaccccctccggagagtccacccaaaggcccaggtggagcgcgtgaaaactcggccgccggcgcacctcaggagtacagcaaccagttcatgggtgctgcaggacagtcgagggtggggtgccgtggaaaggtaagaggtggcccgggatggtgatggtggggggaaaaagagaagcctcaaagagctcagaggcaaattttcacttgggttcttgccccttgcattccccttgccttgagtgtgggagaacacttctgttttagccctgctcctggaaagaaagcctctgtcccaggggaggagaggcatccggacggggcaaagactgctgctacctgcagggtgctccccacccccacccccaacccaggcgcctgctttcgtcccctcccctcctgctttcatcccctgcccccacctccttattggtgctggtttgcagcgcttggctcctgcgcctccgcttcgtgtttgaatctggctcgcccctccgtattatgtctgcactccgaaggaaatttggggacgattaccaggtagtgaccacttcgtcgagcggttcgggcttacagcctcaggggccaggacagggcccgcagcagcagctggtgcccaagaagaaacggcagcggttcgtggacaagaacggccggtgcaatgtgcagcatggtaacctgggcagcgagaccagtcgctacctttcggacctcttcactaccctggtggatctcaagtggcgttggaacctctttatcttcatcctcacctacaccgtggcctggctcttcatggcgtccatgtggtgggtgatcgcttatacccggggcgacctgaacaaagcccatgtcggcaactacactccctgtgtggccaatgtctataacttcccctctgccttcctcttcttcatcgagaccgaggccaccatcggctatggctaccgctacatcacagataagtgccccgagggcatcatcctcttcctcttccagtccatccttggctccatcgtggacgctttcctcatcggctgcatgttcatcaagatgtcccagcccaaaaagcgcgccgagaccctcatgtttagcgagcatgcggttatctccatgagggacggaaaactcactctcatgttccgggtgggcaacctgcgcaacagccacatggtctccgcgcagatccgctgcaagctgctcaaatctcggcagacacctgagggtgagttccttccccttgaccaacttgaactggatgtaggttttagtacaggggccgatcaactttttcttgtgtcccctctcacaatttgccacgtgatcgatgccaaaagccccttctatgacctatcccagcgaagcatgcaaactgaacagttcgaggttgtcgtcatcctggaaggcattgtggaaaccacaggaatgacttgtcaagctcgaacatcatacacagaggacgaagtgctttggggtcatcgttttttccctgtaatttctttagaagaaggattctttaaagtcgattactcccagttccatgcaacctttgaagttccaacccctccttacagcgtgaaagagcaggaggaaatgcttctcatgtcctcccctttaatagcaccagccataaccaacagcaaagaaagacacaattctgtggagtgtttagatggactagatgacattagcacaaaacttccatcgaagctgcagaaaattacggggagagaagactttcccaaaaaacttctgagaatgagttctacaacctcagaaaaagcctatagtttgggtgatttgcccatgaaactccaacgaataagttcagttcctggcaactcggaagaaaaactggtttctaaaaccaccaagatgttatctgatcccatgagccagtctgtggccgatttgccaccaaagcttcaaaagatggctggaggacctaccaggatggaaggaaatcttccagccaaactaagaaaaatgaactctgaccgtttcacatagcaaaacacccctttaggcattatttaatgttttgatttagtattagtccaatatttggctgataagataatcctccctatgaaatctgagaggtctatcctagcctggcaaatagatcagagaactcttcattgaagtgttattattgtgctgaacataagttatgaagggaggacatcataaggaagctactagtcggcatgtattatcacatcaagcatgcaataatgtgcaaattttgcatttagttttatggcatgatttatatatggcatatttatattgaatattctggaaaaatatataaatatatatttgaagtggagatattctccccataatttctaatatatgtattaagccaaacatgagtgaatagctttcagggcactaaaattacatacatacatacatacatacatacatacatacatgcatatgcacagacacatacacacaaatactcatatatataaaacatacccataaaaacatatatatctaataaaaattgtgatgttttgttcaaatttgtatttcttgtgcatgtttactttattagactagaaaggctgctggcattgattatgaataccaaatattttagccttaaattatttgttacttaaaaatctgatttaatgttttctgctgttgccgtcatggaatctttcaactgtactttaccatgaaaagatagcagagattggtggtgtcaaatgacaccacagagacatcattattatgcatttaatttgtaaattttagagtgtgctggtacatagcacacatcactgaacttttcttatgatttttagaagtcactagaacttgggtgggggaggggttagtaaaagttagttaactcatcgattctgaagctaactaatatctggaatttggttttgtactctaataaaactacgggctctgaacaaatgcggaatcattggaagagtcagtagcttattgtgactatgtcagagtctatgtgaaactgacagggtaaacagtgcctgtggccaaatgagttggttgccaatgttttcttcttttttccggatcttttgtcatccataaagacttgtagatatttcaggagacatgacagcacaatgaaacagatgataaattcttttgctggaaatgcatatgcctaacagagactccctttacactgttctcctgtttctggcatttgttgtgaaaggagagactatttactggtctggaaacctattccaggtctgtcactcagagtttagcacagacctgagagaaattaatatcaaatgatctgacaatgtttgtacactcaggattttttggttttgtcttggtgttgaacaattcttttattgttgccttgaatccctggcctcagaataattttagtgttactagctttcaacccccaacatctgactggtatcaaacttggtcagaagtataccttgaacacaaagctttagaataaaaaagttttttgaaactgcagaagtacttctttgcatactaatgtagattttcctacacaatttatgagggatttgtaataatccaacttggcccagaattgatttaacttttcattaatatataaatcactgatggttggtttgagcacacagcattccttattgtttagtgatcctgcgataattttattagaggcaaattattacatctacagtatatcatccactatatcttctggctacctctgtatcaaccaaattctgtaggtgcaaacacataacagggaattactactggagaaatgatcaacattagcatccatccactgtgaatagagcagttgccctaccccttgatcaccaaatgttcttatttgctacatggaggtgatgaaatattagcagacagaaaaaggggaccagtgggtatcgtatatttagcagtggaggaagctgcatagatcatttagtccaacaccttaaaactatacagagccataatattcttcagagagtcattttaatttgtttttggtattgcaaagaaccaaaaacatgctctctgaatttattcatttaacaaaatttttgcatgccttctttgacctaggcattgtttttgtttctgttttttttttttgtttttagtttagttcctggggatttagacatgtacatggtatcagcaagagaaagagagagagacagagagatacagagagagacacaagagagacacagagagagacacaaagagaaacagaaacggagagagacagagacacagagacagcaagagacacggagacagagagagacacagagagaatattcagtagtcaacatttcaattagaaaaatgaaaacaaggtagtaatggaaatgggtataggatgatatgtattcagaatatgatatttagggagttgattaacattaggagtgaaaaacctgacgagaaagagccagtgttgccaaaactcaatccaagtgatcagtacactttgaccttttccgcatacgtgtgggaacagtatgatttctgcatgtacttgcagtttaatccctattcctaggttgatcataggatccagtctgcccaggaaaatcgaggtttatacttgttgtacttgtgtaattataagtagccctctctttaaatcctattatgtcctggtttggatgatatatggtaaagttttgttgacactaacaaaattattgagtctaatatatttggaaaaataaagaattgctttcttctccttttaaaaaaaaaaaaaaaaa

SEQ ID NO: 94 - RNA, 5232 nt, Mus musculus
  source 1..5232: mol_type = mRNA
tttttttttttttttttaaaaggagaagaaagcaattctttatttttccaaatatattagactcaataattttgttagtgtcaacaaaactttaccatatatcatccaaaccaggacataataggatttaaagagagggctacttataattacacaagtacaacaagtataaacctcgattttcctgggcagactggatcctatgatcaacctaggaatagggattaaactgcaagtacatgcagaaatcatactgttcccacacgtatgcggaaaaggtcaaagtgtactgatcacttggattgagttttggcaacactggctctttctcgtcaggtttttcactcctaatgttaatcaactccctaaatatcatattctgaatacatatcatcctatacccatttccattactaccttgttttcatttttctaattgaaatgttgactactgaatattctctctgtgtctctctctgtctccgtgtctcttgctgtctctgtgtctctgtctctctccgtttctgtttctctttgtgtctctctctgtgtctctcttgtgtctctctctgtatctctctgtctctctctctttctcttgctgataccatgtacatgtctaaatccccaggaactaaactaaaaacaaaaaaaaaaaacagaaacaaaaacaatgcctaggtcaaagaaggcatgcaaaaattttgttaaatgaataaattcagagagcatgtttttggttctttgcaataccaaaaacaaattaaaatgactctctgaagaatattatggctctgtatagttttaaggtgttggactaaatgatctatgcagcttcctccactgctaaatatacgatacccactggtcccctttttctgtctgctaatatttcatcacctccatgtagcaaataagaacatttggtgatcaaggggtagggcaactgctctattcacagtggatggatgctaatgttgatcatttctccagtagtaattccctgttatgtgtttgcacctacagaatttggttgatacagaggtagccagaagatatagtggatgatatactgtagatgtaataatttgcctctaataaaattatcgcaggatcactaaacaataaggaatgctgtgtgctcaaaccaaccatcagtgatttatatattaatgaaaagttaaatcaattctgggccaagttggattattacaaatccctcataaattgtgtaggaaaatctacattagtatgcaaagaagtacttctgcagtttcaaaaaacttttttattctaaagctttgtgttcaaggtatacttctgaccaagtttgataccagtcagatgttgggggttgaaagctagtaacactaaaattattctgaggccagggattcaaggcaacaataaaagaattgttcaacaccaagacaaaaccaaaaaatcctgagtgtacaaacattgtcagatcatttgatattaatttctctcaggtctgtgctaaactctgagtgacagacctggaataggtttccagaccagtaaatagtctctcctttcacaacaaatgccagaaacaggagaacagtgtaaagggagtctctgttaggcatatgcatttccagcaaaagaatttatcatctgtttcattgtgctgtcatgtctcctgaaatatctacaagtctttatggatgacaaaagatccggaaaaaagaagaaaacattggcaaccaactcatttggccacaggcactgtttaccctgtcagtttcacatagactctgacatagtcacaataagctactgactcttccaatgattccgcatttgttcagagcccgtagttttattagagtacaaaaccaaattccagatattagttagcttcagaatcgatgagttaactaacttttactaacccctcccccacccaagttctagtgacttctaaaaatcataagaaaagttcagtgatgtgtgctatgtaccagcacactctaaaatttacaaattaaatgcataataatgatgtctctgtggtgtcatttgacaccaccaatctctgctatcttttcatggtaaagtacagttgaaagattccatgacggcaacagcagaaaacattaaatcagatttttaagtaacaaataatttaaggctaaaatatttggtattcataatcaatgccagcagcctttctagtctaataaagtaaacatgcacaagaaatacaaatttgaacaaaacatcacaatttttattagatatatatgtttttatgggtatgttttatatatatgagtatttgtgtgtatgtgtctgtgcatatgcatgtatgtatgtatgtatgtatgtatgtatgtatgtaattttagtgccctgaaagctattcactcatgtttggcttaatacatatattagaaattatggggagaatatctccacttcaaatatatatttatatatttttccagaatattcaatataaatatgccatatataaatcatgccataaaactaaatgcaaaatttgcacattattgcatgcttgatgtgataatacatgccgactagtagcttccttatgatgtcctcccttcataacttatgttcagcacaataataacacttcaatgaagagttctctgatctatttgccaggctaggatagacctctcagatttcatagggaggattatcttatcagccaaatattggactaatactaaatcaaaacattaaataatgcctaaaggggtgttttgctatgtgaaacggtcagagttcatttttcttagtttggctggaagatttccttccatcctggtaggtcctccagccatcttttgaagctttggtggcaaatcggccacagactggctcatgggatcagataacatcttggtggttttagaaaccagtttttcttccgagttgccaggaactgaacttattcgttggagtttcatgggcaaatcacccaaactataggctttttctgaggttgtagaactcattctcagaagttttttgggaaagtcttctctccccgtaattttctgcagcttcgatggaagttttgtgctaatgtcatctagtccatctaaacactccacagaattgtgtctttctttgctgttggttatggctggtgctattaaaggggaggacatgagaagcatttcctcctgctctttcacgctgtaaggaggggttggaacttcaaaggttgcatggaactgggagtaatcgactttaaagaatccttcttctaaagaaattacagggaaaaaacgatgaccccaaagcacttcgtcctctgtgtatgatgttcgagcttgacaagtcattcctgtggtttccacaatgccttccaggatgacgacaacctcgaactgttcagtttgcatgcttcgctgggataggtcatagaaggggcttttggcatcgatcacgtggcaaattgtgagaggggacacaagaaaaagttgatcggcccctgtactaaaacctacatccagttcaagttggtcaaggggaaggaactcaccctcaggtgtctgccgagatttgagcagcttgcagcggatctgcgcggagaccatgtggctgttgcgcaggttgcccacccggaacatgagagtgagttttccgtccctcatggagataaccgcatgctcgctaaacatgagggtctcggcgcgctttttgggctgggacatcttgatgaacatgcagccgatgaggaaagcgtccacgatggagccaaggatggactggaagaggaagaggatgatgccctcggggcacttatctgtgatgtagcggtagccatagccgatggtggcctcggtctcgatgaagaagaggaaggcagaggggaagttatagacattggccacacagggagtgtagttgccgacatgggctttgttcaggtcgccccgggtataagcgatcacccaccacatggacgccatgaagagccaggccacggtgtaggtgaggatgaagataaagaggttccaacgccacttgagatccaccagggtagtgaagaggtccgaaaggtagcgactggtctcgctgcccaggttaccatgctgcacattgcaccggccgttcttgtccacgaaccgctgccgtttcttcttgggcaccagctgctgctgcgggccctgtcctggcccctgaggctgtaagcccgaaccgctcgacgaagtggtcactacctggtaatcgtccccaaatttccttcggagtgcagacataatacggaggggcgagccagattcaaacacgaagcggaggcgcaggagccaagcgctgcaaaccagcaccaataaggaggtgggggcaggggatgaaagcaggaggggaggggacgaaagcaggcgcctgggttgggggtgggggtggggagcaccctgcaggtagcagcagtctttgccccgtccggatgcctctcctcccctgggacagaggctttctttccaggagcagggctaaaacagaagtgttctcccacactcaaggcaaggggaatgcaaggggcaagaacccaagtgaaaatttgcctctgagctctttgaggcttctctttttccccccaccatcaccatcccgggccacctcttacctttccacggcaccccaccctcgactgtcctgcagcacccatgaactggttgctgtactcctgaggtgcgccggcggccgagttttcacgcgctccacctgggcctttgggtggactctccggagggggtgagcggacgtcaagctacccctgcgctccagggagctctggaagcctgggcactcacccagtgacagagaacaggcggaggctctgcaagcagcacaggcagtctggccaagcaccctgcgcttagggtgcctgacccctttctacttttcttggtgttccaagatgagaaccaatgcaggtgtgtcaggctccgtgcctccctggggacactacacagcctctgccagaaacccctgatgctccaagcagagactgactcggacgcctgactcccgggttccttagcgtgcgatgccctctttccaggcgacagtgcgactgctgaacggaggtcagactttcaggttaaacaccggcttttgctccagcttttcccatgcctctcaatagaaacatttgagtcttccttccttcgatctcctattccatgtccgccctttgcttgtcccggatggatggag

SEQ ID NO: 95 - RNA, 1827 nt, Rattus norvegicus
  source 1..1827: mol_type = mRNA
cagcgcttggctcctgcgcctccgcttcgtgtttgaatctggatctcccctccgtattatgtctgcactccgaaggaaatttggggacgattaccaggtagtgaccacttcgtccagcggttcgggcttgcagccccaggggccaggacagggcccacagcagcagcttgtacccaagaagaaacggcagcggttcgtggacaagaacggtcggtgcaatgtgcagcacggcaacctgggcagcgagaccagtcgctacctttccgacctcttcactaccctggtggatctcaagtggcgttggaacctctttatcttcatcctcacctacaccgtggcctggctcttcatggcgtccatgtggtgggtgatcgcttatacccggggcgacctgaacaaagcccatgtcggcaactacactccctgtgtggccaatgtctataacttcccctctgccttccttttcttcatcgagaccgaggccaccatcggctatggctaccgctacatcaccgacaagtgccccgagggcatcatccttttccttttccagtccatccttggctccatcgtggacgctttcctcatcggctgcatgttcatcaagatgtcccagcccaaaaagcgcgccgagaccctcatgtttagcgagcatgcggttatttccatgagggacggaaaactcactctcatgttccgggtgggcaacctgcgcaacagccacatggtctccgcgcagatccgctgcaagctgctcaaatctcggcagacacctgagggtgagtttctaccccttgaccaacttgaactggatgtaggttttagtacaggggcagatcaactttttcttgtgtcccctctcaccatttgccacgtgattgatgccaaaagccccttttatgacctatcccagcgaagcatgcaaactgaacagttcgaggtggtcgtcatcctggaaggcatcgtggaaaccacagggatgacttgtcaagctcgaacatcatacaccgaagatgaagttctttggggtcatcgttttttccctgtaatttctttagaagaaggattctttaaagtcgattactcccagttccatgcaacctttgaagtccccacccctccgtacagtgtgaaagagcaggaagaaatgcttctcatgtcttcccctttaatagcaccagccataaccaacagcaaagaaagacacaattctgtggagtgcttagatggactagatgacattagcacaaaacttccatcgaagctgcagaaaattacggggagagaagactttcccaaaaaactcctgaggatgagttctacaacttcagaaaaagcctatagtttgggtgatttgcccatgaaactccaacgaataagttcggttcctggcaactctgaagaaaaactggtatctaaaaccaccaagatgttatcagatcccatgagccagtctgtggccgatttgccaccgaagcttcaaaagatggctggaggacctaccaggatggaagggaatcttccagccaaactaagaaaaatgaactctgaccgcttcacatagcaaaacaccccattaggcattatttcatgttttgatttagttttagtccaatatttggctgataagataatcctccccgggaaatctgagaggtctatcccagtctggcaaattcatcagaggactcttcattgaagtgttgttactgtgttgaacatgagttacaaagggaggacatcataagaaagctaatagttggcatgtattatcacatcaagcatgcaataatgtgcaaattttgcatttagttttctggcatgatt

SEQ ID NO: 96 - RNA, 1827 nt, Rattus norvegicus
  source 1..1827: mol_type = mRNA
aatcatgccagaaaactaaatgcaaaatttgcacattattgcatgcttgatgtgataatacatgccaactattagctttcttatgatgtcctccctttgtaactcatgttcaacacagtaacaacacttcaatgaagagtcctctgatgaatttgccagactgggatagacctctcagatttcccggggaggattatcttatcagccaaatattggactaaaactaaatcaaaacatgaaataatgcctaatggggtgttttgctatgtgaagcggtcagagttcatttttcttagtttggctggaagattcccttccatcctggtaggtcctccagccatcttttgaagcttcggtggcaaatcggccacagactggctcatgggatctgataacatcttggtggttttagataccagtttttcttcagagttgccaggaaccgaacttattcgttggagtttcatgggcaaatcacccaaactataggctttttctgaagttgtagaactcatcctcaggagttttttgggaaagtcttctctccccgtaattttctgcagcttcgatggaagttttgtgctaatgtcatctagtccatctaagcactccacagaattgtgtctttctttgctgttggttatggctggtgctattaaaggggaagacatgagaagcatttcttcctgctctttcacactgtacggaggggtggggacttcaaaggttgcatggaactgggagtaatcgactttaaagaatccttcttctaaagaaattacagggaaaaaacgatgaccccaaagaacttcatcttcggtgtatgatgttcgagcttgacaagtcatccctgtggtttccacgatgccttccaggatgacgaccacctcgaactgttcagtttgcatgcttcgctgggataggtcataaaaggggcttttggcatcaatcacgtggcaaatggtgagaggggacacaagaaaaagttgatctgcccctgtactaaaacctacatccagttcaagttggtcaaggggtagaaactcaccctcaggtgtctgccgagatttgagcagcttgcagcggatctgcgcggagaccatgtggctgttgcgcaggttgcccacccggaacatgagagtgagttttccgtccctcatggaaataaccgcatgctcgctaaacatgagggtctcggcgcgctttttgggctgggacatcttgatgaacatgcagccgatgaggaaagcgtccacgatggagccaaggatggactggaaaaggaaaaggatgatgccctcggggcacttgtcggtgatgtagcggtagccatagccgatggtggcctcggtctcgatgaagaaaaggaaggcagaggggaagttatagacattggccacacagggagtgtagttgccgacatgggctttgttcaggtcgccccgggtataagcgatcacccaccacatggacgccatgaagagccaggccacggtgtaggtgaggatgaagataaagaggttccaacgccacttgagatccaccagggtagtgaagaggtcggaaaggtagcgactggtctcgctgcccaggttgccgtgctgcacattgcaccgaccgttcttgtccacgaaccgctgccgtttcttcttgggtacaagctgctgctgtgggccctgtcctggcccctggggctgcaagcccgaaccgctggacgaagtggtcactacctggtaatcgtccccaaatttccttcggagtgcagacataatacggaggggagatccagattcaaacacgaagcggaggcgcaggagccaagcgctg

SEQ ID NO: 97 - RNA, 1965 nt, Macaca mulatta
  source 1..1965: mol_type = mRNA
agagaccgcagctacctgccgggtgcgccccccacccaggagcgctcgcttcgccccctttcctcccccgcccccacctctttattggtgctagtttgcagcgcccagctcctgcgccttcgctttgcgtttgaatctggctcgccccttcgtattatgtctgcactccgaaggaaatttggggacgattaccaggtagtgaccacatcgtccagcggctcgggcttgcagccccagggtccaggccaggaccctcagcagcagcttgtgcccaagaagaagcggcagcggttcgtggacaagaacggccggtgcaatgtacagcacggcaacctgggcagcgagacgagccgctacctctcggacctcttcaccacgctggtggacctcaagtggcgctggaacctcttcatcttcattctcacctacaccgtggcctggctcttcatggcatccatgtggtgggtgatcgcctacactcggggcgacctgaacaaagcccacgtcggtaactacacgccttgcgtggccaatgtctataacttcccttctgccttcctcttcttcattgagaccgaggccaccatcggctatggctaccgatacatcacagacaagtgccccgagggcatcatcctcttcctcttccagtccatcctgggctccatcgtggacgccttcctcatcggctgcatgttcatcaagatgtcccagcctaagaagcgcgccgagaccctcatgttcagcgagcacgcggtgatctccatgagggacggaaaactcacgcttatgttccgggtgggcaacctgcgcaacagccacatggtctccgcgcagatccgctgcaagctgctcaaatctcggcagacacctgagggtgagttccttccccttgaccaacttgaactggatgtaggttttagtacaggggcagatcaactttttcttgtgtcccccctcacaatttgccacgtgatcgatgccaaaagccccttttatgacctatcccagcgaagcatgcaaactgaacagttcgagattgtcgtcatcctagaaggcattgtggaaacaactgggatgacttgtcaagctcgaacatcatatactgaagatgaagttctttggggtcaccgtttttttcctgtaatttccttagaagagggattctttaaagttgattactcccagttccatgcaacatttgaagtccccaccccaccttacagtgtgaaagagcaggaggaaatgcttctcatgtcatcccctttaatagcaccagccataactaacagcaaagaaagacataattctgtggaatgcttagatggactagatgatattactacaaaactaccatctaagctacagaaaattactggaagagaagactttcccaaaaaactcttgaggatgagttctacaacttcagaaaaagcctacagcttgggagacttgcccatgaaacttcaacgaataagttcagttccgggcaactcagaagaaaaactggtatctaaaaccaccaagatgttatctgatcccatgagccagtctgtggctgatttgccaccaaagcttcaaaagatggctggaggagcagctaggatggaagggaaccttccagccaaattaagaaaaatgaactctgatcgcttcacataacaaagcactcccttaggcattatttaatgtttgatttagtaatagtccaatatttggcgatgaggtaattctccctaaggaatctgaaagtatattttcctcccagttctacaagcatatttgagaacccttcctttcccaagtattgctaatgtgcagaaagcaacagttacggagggaggacatcataaggaagttattaacgggcatgtattatcacatcaagcatgcaataatgtgcaaattttgcatttagttttatggcatgatttatatatggcatatttatattgtatattctgg

SEQ ID NO: 98 - RNA, 1965 nt, Macaca mulatta
  source 1..1965: mol_type = mRNA
ccagaatatacaatataaatatgccatatataaatcatgccataaaactaaatgcaaaatttgcacattattgcatgcttgatgtgataatacatgcccgttaataacttccttatgatgtcctccctccgtaactgttgctttctgcacattagcaatacttgggaaaggaagggttctcaaatatgcttgtagaactgggaggaaaatatactttcagattccttagggagaattacctcatcgccaaatattggactattactaaatcaaacattaaataatgcctaagggagtgctttgttatgtgaagcgatcagagttcatttttcttaatttggctggaaggttcccttccatcctagctgctcctccagccatcttttgaagctttggtggcaaatcagccacagactggctcatgggatcagataacatcttggtggttttagataccagtttttcttctgagttgcccggaactgaacttattcgttgaagtttcatgggcaagtctcccaagctgtaggctttttctgaagttgtagaactcatcctcaagagttttttgggaaagtcttctcttccagtaattttctgtagcttagatggtagttttgtagtaatatcatctagtccatctaagcattccacagaattatgtctttctttgctgttagttatggctggtgctattaaaggggatgacatgagaagcatttcctcctgctctttcacactgtaaggtggggtggggacttcaaatgttgcatggaactgggagtaatcaactttaaagaatccctcttctaaggaaattacaggaaaaaaacggtgaccccaaagaacttcatcttcagtatatgatgttcgagcttgacaagtcatcccagttgtttccacaatgccttctaggatgacgacaatctcgaactgttcagtttgcatgcttcgctgggataggtcataaaaggggcttttggcatcgatcacgtggcaaattgtgaggggggacacaagaaaaagttgatctgcccctgtactaaaacctacatccagttcaagttggtcaaggggaaggaactcaccctcaggtgtctgccgagatttgagcagcttgcagcggatctgcgcggagaccatgtggctgttgcgcaggttgcccacccggaacataagcgtgagttttccgtccctcatggagatcaccgcgtgctcgctgaacatgagggtctcggcgcgcttcttaggctgggacatcttgatgaacatgcagccgatgaggaaggcgtccacgatggagcccaggatggactggaagaggaagaggatgatgccctcggggcacttgtctgtgatgtatcggtagccatagccgatggtggcctcggtctcaatgaagaagaggaaggcagaagggaagttatagacattggccacgcaaggcgtgtagttaccgacgtgggctttgttcaggtcgccccgagtgtaggcgatcacccaccacatggatgccatgaagagccaggccacggtgtaggtgagaatgaagatgaagaggttccagcgccacttgaggtccaccagcgtggtgaagaggtccgagaggtagcggctcgtctcgctgcccaggttgccgtgctgtacattgcaccggccgttcttgtccacgaaccgctgccgcttcttcttgggcacaagctgctgctgagggtcctggcctggaccctggggctgcaagcccgagccgctggacgatgtggtcactacctggtaatcgtccccaaatttccttcggagtgcagacataatacgaaggggcgagccagattcaaacgcaaagcgaaggcgcaggagctgggcgctgcaaactagcaccaataaagaggtgggggcgggggaggaaagggggcgaagcgagcgctcctgggtggggggcgcacccggcaggtagctgcggtctct

SEQ ID NO: 99 - RNA, 4988 nt, Macaca fascicularis
  source 1..4988: mol_type = mRNA
aggtaaaggcagcttcttagtcagccagcgagttggcaggtgggttggggctcgctggtcaactcatttattttaagcagccagtttgggggtactgcaggataatcaggagggccgtggggagtcaagaggtgacccgggatgccggtggtggagaaagaaaagaggagcctcgggaagcttggaggcacaattgcgcttgggttcctggtccttgcatccctcctgccttgagtgcgggagaacacttttttaagactcaccttggcaagaaaacctccgtcctaggggagaaggagaggcgtcttctgcagggggcagagaccgcagctacctgccgggtgcgccccccacccaggagcgctcgcttcgccccctttcctcccccgcccccacctctttattggtgctagtttgcagcgcccagctcctgcgccttcgctttgcgtttgaatctggctcgccccttcgtattatgtctgcactccgaaggaaatttggggacgattaccaggtagtgaccacatcgtccagcggctcgggcttgcagccccagggtccaggccaggaccctcagcagcagcttgtgcccaagaagaagcggcagcggttcgtggacaagaacggccggtgcaatgtacagcacggcaacctgggcagcgagacgagccgctacctctcggacctcttcaccacgctggtggacctcaagtggcgctggaacctcttcatcttcattctcacctacaccgtggcctggctcttcatggcatccatgtggtgggtgatcgcctacactcggggcgacctgaacaaagcccacgtcggtaactacacgccttgcgtggccaatgtctataacttcccttctgccttcctcttcttcattgagaccgaggccaccatcggctatggctaccgatacatcacagacaagtgccccgagggcatcatcctcttcctcttccagtccatcctgggctccatcgtggacgccttcctcatcggctgcatgttcatcaagatgtcccagcctaagaagcgcgccgagaccctcatgttcagcgagcacgcggtgatctccatgagggacggaaaactcacgcttatgttccgggtgggcaacctgcgcaacagccacatggtctccgcgcagatccgctgcaagctgctcaaatctcggcagacacctgagggtgagttccttccccttgaccaacttgaactggatgtaggttttagtacaggggcagatcaactttttcttgtgtcccccctcacaatttgccacgtgatcgatgccaaaagccccttttatgacctatcccagcgaagcatgcaaactgaacagttcgagattgtcgtcatcctagaaggcattgtggaaacaactgggatgacttgtcaagctcgaacatcatatactgaagatgaagttctttggggtcaccgtttttttcctgtaatttccttagaagagggattctttaaagttgattactcccagttccatgcaacatttgaagtccccaccccaccttacagtgtgaaagagcaggaggaaatgcttctcatgtcatcccctttaatagcaccagccataactaacagcaaagaaagacataattctgtggaatgcttagatggactagatgatattactacaaaactaccatctaagctgcagaaaattactggaagagaagactttcccaaaaaactcttgaggatgagttctacaacttcagaaaaagcctacagcttgggagacttgcccatgaaacttcaacgaataagttcagttccgggcaactcagaagaaaaactggtatctaaaacgaccaagatgttatctgatcccatgagccagtctgtggctgatttgccaccaaagcttcaaaagatggctggaggagcagctaggatggaagggaaccttccagccaaattaagaaaaatgaactctgatcgcttcacataacaaagcactcccttaggcattatttaatgtttgatttagtaatagtccaatatttggcgatgaggtaattctccctaaggaatctgaaagtatattttcctcccagttctacaagcatatttgagaacccttcctttcccaagtattgctaatgtgcagaaagcaacagttacggagggaggacatcataaggaagttattaacgggcatgtattatcacatcaagcatgcaataatgtgcaaattttgcatttagttttatggcatgatttatatatggcatatttatattgtatattctggaaaaatatatatatatatatatatatttaaaggggaaatactctccccgacatttctaacatatatattaagccaaacatgagtgaatagttttcagggcgataaaactaaatatatgtctgtgtgtgtgtgtatgtatacacacatatacatatatatatatacatacatacacatacatacatacatacatatatatctgataaaattgtgatgttttgttcaaagttgtagttcttgtgcatgtttactttattagagtaggaaggctactggcattaattattaataccaaatattttagccttaaatttttgtcattttaaaatctgatttaatgttttctgctgtttaaggtcctgggaggctttcaattgtattttatatgagagaatcacacaagtttgtgctatctatggccctgcaaaaatataaccattacatgtttaaattgtaaactttagagcataccagtactcagtatagcaccgaacatttcttatgatttttaaaagttgctagtactggggagaaataattattgattaatttgagaatcattcctttcctagactaattaaaatctggaaatctattttgtatatgatctaatacaaagatgagctctgaacaaacactgaatcatgttattagacagtagccaggttatattgaatatatcagaatctgtgtgaagttatacaattaatggtccctgttttcaaactgagtaaattggaaacattttcattccttttctggaaattttgtccattttaaagaccaatcattttaagaagacatgacaatgcaatgaaacagatgataaatatttatgcttaaaatatgtatgtctatttgagtctctttttaactctgttttcttgtttatggcatttgttgtaacaggatagactttttcctcacctggggaacctatcccatgcttgtcacttatagttcaggaggaagtttttgcacagaccagagagaaattaaaattagataaattgaagatatcttacacacagttttttggtgaacactgattttattggtgtcttggatccctggtctacccaaataattttaacagtactgttttttctaatcctgaagtctgatatttatgacttataagcaggaatcaaaactagtgatcagtagaacattttcaaaataaaaatttggaatgcagagacttttatgaaaatgtaaaagtgctccttaacagaatatcatgggttttcctataaaacttaagtatttataatttaagtctgccccaaattttaaaaagttctcattaatatgtaagtcattaattgctagtttgggctctcattatttcctattttttaacaattttgtgataattttattattggcaaattaatacatcacttaaatcactgactataataataccttctggctacctctgtatcaaccaaattctgtaggtgcaaacatataccagggaattcttactggcaaaatgatctatcttgagtgtgcatccactgtgaatggagcgaactgccctatacccattgataaccaagctttcttattttgtggatgtaggaaacaaaatagtgagagagagagaaaggggtacacagggcatggtatattgatcagcagtgggaaaaaagtgcatagatcatttagtccaagaacttaaaactaaatagagccataatttactttggagagtcatttgaatttgtctttggtaccaacgagaagacagagccaaaaacaaactctccaagtgtattcacactttcaacaaaatttttgcatgccttctatgtcgtaggcatttttagttcctggggatttggacatagctaagtcagaggaggctgttgctcaccatgaacactgtataccagaaggagagtggggaggagacaaacaacaaataagaccacttcagacaaagtatcagttaagagaagaaaacaggcctgacgcagtggttcacgcctgtaatcccagtactttgggaggccgaggttggggcatcacctgaggtcaggagttcaagaccagcctggacaacatggtgaaatcccatctgtactaaaaatgcaaaaattaactgggcatggtggcaggcacctgtaatcccagttactggggaagctgaggcaagagaatcgcttgaacctgggaggcagaggttgcagtgagccgagattctgccactgtactccagcctgggtgacagagcaagactccatctcaacatctaaaaaaaaaaaagaataaaaacagggtaacataatgcaaagtaactgtgtggggtaaaaattgattattttagaaaaatgtcactggcttaggacagggataatatgtgaacagaaatctatctgatgagaaagagctactgttgttgaaattaccttatctgagtgaatggtgttttttttttatcttttccacacatgcgtgggaaaggtatgatttctgcatgtaattgcagtttaacccttatttctaggttgatcgtaggtcccagtttacccaggaagattccagtttatacctgttgtacctgtgtaattattggtagcactccctttcactcttacaatgtcttggtttggatgatatatggtgaagtttttgttgaaactaaattatgaagtctgatatatttggataaaaataaagaattgcttttcttctc

SEQ ID NO: 100 - RNA, 4988 nt, Macaca fascicularis
  source 1..4988: mol_type = mRNA
gagaagaaaagcaattctttatttttatccaaatatatcagacttcataatttagtttcaacaaaaacttcaccatatatcatccaaaccaagacattgtaagagtgaaagggagtgctaccaataattacacaggtacaacaggtataaactggaatcttcctgggtaaactgggacctacgatcaacctagaaataagggttaaactgcaattacatgcagaaatcatacctttcccacgcatgtgtggaaaagataaaaaaaaaacaccattcactcagataaggtaatttcaacaacagtagctctttctcatcagatagatttctgttcacatattatccctgtcctaagccagtgacatttttctaaaataatcaatttttaccccacacagttactttgcattatgttaccctgtttttattcttttttttttttagatgttgagatggagtcttgctctgtcacccaggctggagtacagtggcagaatctcggctcactgcaacctctgcctcccaggttcaagcgattctcttgcctcagcttccccagtaactgggattacaggtgcctgccaccatgcccagttaatttttgcatttttagtacagatgggatttcaccatgttgtccaggctggtcttgaactcctgacctcaggtgatgccccaacctcggcctcccaaagtactgggattacaggcgtgaaccactgcgtcaggcctgttttcttctcttaactgatactttgtctgaagtggtcttatttgttgtttgtctcctccccactctccttctggtatacagtgttcatggtgagcaacagcctcctctgacttagctatgtccaaatccccaggaactaaaaatgcctacgacatagaaggcatgcaaaaattttgttgaaagtgtgaatacacttggagagtttgtttttggctctgtcttctcgttggtaccaaagacaaattcaaatgactctccaaagtaaattatggctctatttagttttaagttcttggactaaatgatctatgcacttttttcccactgctgatcaatataccatgccctgtgtacccctttctctctctctcactattttgtttcctacatccacaaaataagaaagcttggttatcaatgggtatagggcagttcgctccattcacagtggatgcacactcaagatagatcattttgccagtaagaattccctggtatatgtttgcacctacagaatttggttgatacagaggtagccagaaggtattattatagtcagtgatttaagtgatgtattaatttgccaataataaaattatcacaaaattgttaaaaaataggaaataatgagagcccaaactagcaattaatgacttacatattaatgagaactttttaaaatttggggcagacttaaattataaatacttaagttttataggaaaacccatgatattctgttaaggagcacttttacattttcataaaagtctctgcattccaaatttttattttgaaaatgttctactgatcactagttttgattcctgcttataagtcataaatatcagacttcaggattagaaaaaacagtactgttaaaattatttgggtagaccagggatccaagacaccaataaaatcagtgttcaccaaaaaactgtgtgtaagatatcttcaatttatctaattttaatttctctctggtctgtgcaaaaacttcctcctgaactataagtgacaagcatgggataggttccccaggtgaggaaaaagtctatcctgttacaacaaatgccataaacaagaaaacagagttaaaaagagactcaaatagacatacatattttaagcataaatatttatcatctgtttcattgcattgtcatgtcttcttaaaatgattggtctttaaaatggacaaaatttccagaaaaggaatgaaaatgtttccaatttactcagtttgaaaacagggaccattaattgtataacttcacacagattctgatatattcaatataacctggctactgtctaataacatgattcagtgtttgttcagagctcatctttgtattagatcatatacaaaatagatttccagattttaattagtctaggaaaggaatgattctcaaattaatcaataattatttctccccagtactagcaacttttaaaaatcataagaaatgttcggtgctatactgagtactggtatgctctaaagtttacaatttaaacatgtaatggttatatttttgcagggccatagatagcacaaacttgtgtgattctctcatataaaatacaattgaaagcctcccaggaccttaaacagcagaaaacattaaatcagattttaaaatgacaaaaatttaaggctaaaatatttggtattaataattaatgccagtagccttcctactctaataaagtaaacatgcacaagaactacaactttgaacaaaacatcacaattttatcagatatatatgtatgtatgtatgtatgtgtatgtatgtatatatatatatgtatatgtgtgtatacatacacacacacacagacatatatttagttttatcgccctgaaaactattcactcatgtttggcttaatatatatgttagaaatgtcggggagagtatttcccctttaaatatatatatatatatatatatttttccagaatatacaatataaatatgccatatataaatcatgccataaaactaaatgcaaaatttgcacattattgcatgcttgatgtgataatacatgcccgttaataacttccttatgatgtcctccctccgtaactgttgctttctgcacattagcaatacttgggaaaggaagggttctcaaatatgcttgtagaactgggaggaaaatatactttcagattccttagggagaattacctcatcgccaaatattggactattactaaatcaaacattaaataatgcctaagggagtgctttgttatgtgaagcgatcagagttcatttttcttaatttggctggaaggttcccttccatcctagctgctcctccagccatcttttgaagctttggtggcaaatcagccacagactggctcatgggatcagataacatcttggtcgttttagataccagtttttcttctgagttgcccggaactgaacttattcgttgaagtttcatgggcaagtctcccaagctgtaggctttttctgaagttgtagaactcatcctcaagagttttttgggaaagtcttctcttccagtaattttctgcagcttagatggtagttttgtagtaatatcatctagtccatctaagcattccacagaattatgtctttctttgctgttagttatggctggtgctattaaaggggatgacatgagaagcatttcctcctgctctttcacactgtaaggtggggtggggacttcaaatgttgcatggaactgggagtaatcaactttaaagaatccctcttctaaggaaattacaggaaaaaaacggtgaccccaaagaacttcatcttcagtatatgatgttcgagcttgacaagtcatcccagttgtttccacaatgccttctaggatgacgacaatctcgaactgttcagtttgcatgcttcgctgggataggtcataaaaggggcttttggcatcgatcacgtggcaaattgtgaggggggacacaagaaaaagttgatctgcccctgtactaaaacctacatccagttcaagttggtcaaggggaaggaactcaccctcaggtgtctgccgagatttgagcagcttgcagcggatctgcgcggagaccatgtggctgttgcgcaggttgcccacccggaacataagcgtgagttttccgtccctcatggagatcaccgcgtgctcgctgaacatgagggtctcggcgcgcttcttaggctgggacatcttgatgaacatgcagccgatgaggaaggcgtccacgatggagcccaggatggactggaagaggaagaggatgatgccctcggggcacttgtctgtgatgtatcggtagccatagccgatggtggcctcggtctcaatgaagaagaggaaggcagaagggaagttatagacattggccacgcaaggcgtgtagttaccgacgtgggctttgttcaggtcgccccgagtgtaggcgatcacccaccacatggatgccatgaagagccaggccacggtgtaggtgagaatgaagatgaagaggttccagcgccacttgaggtccaccagcgtggtgaagaggtccgagaggtagcggctcgtctcgctgcccaggttgccgtgctgtacattgcaccggccgttcttgtccacgaaccgctgccgcttcttcttgggcacaagctgctgctgagggtcctggcctggaccctggggctgcaagcccgagccgctggacgatgtggtcactacctggtaatcgtccccaaatttccttcggagtgcagacataatacgaaggggcgagccagattcaaacgcaaagcgaaggcgcaggagctgggcgctgcaaactagcaccaataaagaggtgggggcgggggaggaaagggggcgaagcgagcgctcctgggtggggggcgcacccggcaggtagctgcggtctctgccccctgcagaagacgcctctccttctcccctaggacggaggttttcttgccaaggtgagtcttaaaaaagtgttctcccgcactcaaggcaggagggatgcaaggaccaggaacccaagcgcaattgtgcctccaagcttcccgaggctcctcttttctttctccaccaccggcatcccgggtcacctcttgactccccacggccctcctgattatcctgcagtacccccaaactggctgcttaaaataaatgagttgaccagcgagccccaacccacctgccaactcgctggctgactaagaagctgcctttacct

SEQ ID NO: 101 - RNA, 2065 nt, Homo sapiens
  source 1..2065: mol_type = mRNA
gggagcggcgcgggacggccgggacgcgcggagaccccaagacccacgcgcagaccgagcggcagccggggaggggagcgcgggccggccggccgagttcgcgggcagggggcgccgggactcccctttccgcgcccgggacgccgcccgccggatcgcgccttgggatgtagcgcccgctcgccgcctcccggactctcgtcggaccctccgcccagcggccctgcgtcttcccaggtgaccacgccggcttcaggacatgcacggacacagccgcaacggccaggcccacgtgccccggcggaagcgccgcaaccgcttcgtcaagaagaacggccaatgcaacgtgtacttcgccaacctgagcaacaagtcgcagcgctacatggcggacatcttcaccacctgcgtggacacgcgctggcgctacatgctcatgatcttctccgcggccttccttgtctcctggctctttttcggcctcctcttctggtgtatcgccttcttccacggtgacctggaggccagcccaggggtgcctgcggcggggggcccggcggcgggtggtggcggagcagccccggtggcccccaagccctgcatcatgcacgtgaacggcttcctgggtgccttcctgttctcggtggagacgcagacgaccatcggctatgggttccggtgcgtgacagaggagtgcccgctggcagtcatcgctgtggtggtccagtccatcgtgggctgcgtcatcgactccttcatgattggcaccatcatggccaagatggcgcggcccaagaagcgggcgcagacgttgctgttcagccaccacgcggtcatttcggtgcgcgacggcaagctctgcctcatgtggcgcgtgggcaacctgcgcaagagccacattgtggaggcccacgtgcgggcccagctcatcaagccctacatgacccaggagggcgagtacctgcccctggaccagcgggacctcaacgtgggctatgacatcggcctggaccgcatcttcctggtgtcgcccatcatcattgtccacgagatcgacgaggacagcccgctttatggcatgggcaaggaggagctggagtcggaggactttgagatcgtggtcatcctggagggcatggtggaggccacggccatgaccacccaggcccgcagctcctacctggccagcgagatcctgtggggccaccgctttgagcctgtggtcttcgaggagaagagccactacaaggtggactactcacgttttcacaagacctacgaggtggccggcacgccctgctgctcggcccgggagctgcaggagagtaagatcaccgtgctgcccgccccaccgccccctcccagtgccttctgctacgagaacgagctggcccttatgagccaggaggaagaggagatggaggaggaggcagctgcggcggccgcggtggccgcaggcctgggcctggaggcgggttccaaggaggaggcgggcatcatccggatgctggagttcggcagccacctggacctggagcgcatgcaggcttccctcccgctggacaacatctcctaccgcagggagtctgccatctgacctccaggcccggccctcaccactgcccacaagagcctctgccgggggtgggatgccaggacaccccctcccacactcaggacagagccaaccctggctccgtggaccttctggaggaaggtgggggtttcaaagactgggggaccccttcctcctgactccagcacccaggcctgggaagagctcggccccgatcagcctgagttccgccagcgcctacttctggtggctctaggtccccggatccaccacccttcccccactgactcttcaaggacgtgccctctttgctctcagaaccttggggaaggtggctggactgctgggcgggggacatctcggggtttcagggtgggcagggggttagtttggggaggggggggtgcgtttcttttgcatgactgtggcctgttgctcatgactttcttttgtaaatatctataaatggagacagatggagacaccaaa

SEQ ID NO: 102 - RNA, 2065 nt, Homo sapiens
  source 1..2065: mol_type = mRNA
tttggtgtctccatctgtctccatttatagatatttacaaaagaaagtcatgagcaacaggccacagtcatgcaaaagaaacgcacccccccctccccaaactaaccccctgcccaccctgaaaccccgagatgtcccccgcccagcagtccagccaccttccccaaggttctgagagcaaagagggcacgtccttgaagagtcagtgggggaagggtggtggatccggggacctagagccaccagaagtaggcgctggcggaactcaggctgatcggggccgagctcttcccaggcctgggtgctggagtcaggaggaaggggtcccccagtctttgaaacccccaccttcctccagaaggtccacggagccagggttggctctgtcctgagtgtgggagggggtgtcctggcatcccacccccggcagaggctcttgtgggcagtggtgagggccgggcctggaggtcagatggcagactccctgcggtaggagatgttgtccagcgggagggaagcctgcatgcgctccaggtccaggtggctgccgaactccagcatccggatgatgcccgcctcctccttggaacccgcctccaggcccaggcctgcggccaccgcggccgccgcagctgcctcctcctccatctcctcttcctcctggctcataagggccagctcgttctcgtagcagaaggcactgggagggggcggtggggcgggcagcacggtgatcttactctcctgcagctcccgggccgagcagcagggcgtgccggccacctcgtaggtcttgtgaaaacgtgagtagtccaccttgtagtggctcttctcctcgaagaccacaggctcaaagcggtggccccacaggatctcgctggccaggtaggagctgcgggcctgggtggtcatggccgtggcctccaccatgccctccaggatgaccacgatctcaaagtcctccgactccagctcctccttgcccatgccataaagcgggctgtcctcgtcgatctcgtggacaatgatgatgggcgacaccaggaagatgcggtccaggccgatgtcatagcccacgttgaggtcccgctggtccaggggcaggtactcgccctcctgggtcatgtagggcttgatgagctgggcccgcacgtgggcctccacaatgtggctcttgcgcaggttgcccacgcgccacatgaggcagagcttgccgtcgcgcaccgaaatgaccgcgtggtggctgaacagcaacgtctgcgcccgcttcttgggccgcgccatcttggccatgatggtgccaatcatgaaggagtcgatgacgcagcccacgatggactggaccaccacagcgatgactgccagcgggcactcctctgtcacgcaccggaacccatagccgatggtcgtctgcgtctccaccgagaacaggaaggcacccaggaagccgttcacgtgcatgatgcagggcttgggggccaccggggctgctccgccaccacccgccgccgggccccccgccgcaggcacccctgggctggcctccaggtcaccgtggaagaaggcgatacaccagaagaggaggccgaaaaagagccaggagacaaggaaggccgcggagaagatcatgagcatgtagcgccagcgcgtgtccacgcaggtggtgaagatgtccgccatgtagcgctgcgacttgttgctcaggttggcgaagtacacgttgcattggccgttcttcttgacgaagcggttgcggcgcttccgccggggcacgtgggcctggccgttgcggctgtgtccgtgcatgtcctgaagccggcgtggtcacctgggaagacgcagggccgctgggcggagggtccgacgagagtccgggaggcggcgagcgggcgctacatcccaaggcgcgatccggcgggcggcgtcccgggcgcggaaaggggagtcccggcgccccctgcccgcgaactcggccggccggcccgcgctcccctccccggctgccgctcggtctgcgcgtgggtcttggggtctccgcgcgtcccggccgtcccgcgccgctccc

SEQ ID NO: 103 - RNA, 7039 nt, Mus musculus
  source 1..7039: mol_type = mRNA
tacaagatttctttgggtgcccagtggggaaggagggactggtcacaacactgtaagacccagcgggtagcataagaaatcttgtttgaggaagttgcatgcaggattgtaattaaggaaaagtgtcaaggcaagtgagttttgagtagtaggagtttgcctccagagccaagagccggagtaaggaaaggcctacgaacaaggagggaggcgatggcgcactgtcccagagcctctgcgcggctctgagttggaacagatgatcttcaggttaggcagaggagtttagagtctcagcagccgaactgagaagctgctccgtttaaaccactgtttctctcccgtccatagtctgtgtgtatatttttactgggatagtcacagggccaaagttaagcaaagcgtttcgaaggaacacgtaaagaatcacttgtcagctgtttgatccccttcgcaggaacccgagacccaaggagggcttgcaaaaacagaccccgtgcagcctccgagggcggattccggttcagtagcgccttcctggcgcggtagaattcagccgctagaagtgctcgggattgactgtgcggggtgggggtgggggggtgacgcgggtttccgcacatcaccgcgctgtgcttctgaggtgtgtgctcgctactcttggagagttactctaaggacaggtgtcgttttcccgaaaccctaaacgctgtggtccgcgcgctgctctagtctggtggctgagtcgtgagccgggcctggcccgggcgaggttcccacggcaaccgcaagccgctccgggcgtctccggagtgacgaggcgcgaaccaagacccggagccgggatttctggagccgagccacggagcgaggcaggagagagatcgcggctggccaaatgaggaggggagccacgccgcggcctttcgtccttgcgcgggcatccagcaaactcctcttccactcatcccagcctcagtgtggccatcagctgcggctagataccctcctggggattccttccctgctatcaaggtggggagacggagagctaggcagcatcccagtatcactgggtgaagtgggcaaagccaggctctgtcccaggtggctgatattccggacagagaactgtgcagacaagtggaagacaggccacacgcacctcctctggttcgaggactagcccagttagtaacctgctgtgtggtcttgaagtccccactcctctccaggtctaggagatggaacattaccaccaatgtctcagagtagctcttaccaagtgtgtgaaatagtcaccaagtttaaaagaagctgtcaaactgcaaagtgccttgcacatgccaagggccatctccgtctctgttctggtcctgtccctcactccagccccagaagcttggtctcagaaccttccatgcctagaggtttcaagcctgcaggccctgcatctccccaggtgaccacgacgacgtcctcaggtcatgcacggacacaaccgaaacgggcaggcccacgtgcccaggcggaaacgccgcaaccgctttgtcaagaagaacggccagtgtaacgtctacttcgccaacctgagcaacaagtcccagcgctacatggcagacatcttcaccacctgcgtggacacgcgctggcgctatatgctcatgatcttctccgcggccttcctcgtttcctggctcttcttcggcctcctcttctggtgcattgccttcttccatggtgacctggaggccagtccctctgtgcccgcggcaggaggcccggggggcaatggcggggcaagcccgaatgcccccaaaccctgtatcatgcacgtaaacggctttttgggggccttcctcttctcagtggagacccagacgaccattggctacgggttccggtgtgtgacagaggagtgcccgttggcggtcattgcggtggttgtccagtccattgtgggctgtgtcattgactccttcatgattggcacgatcatggccaagatggcacggcccaagaagcgggcacagaccctgctgttcagccaccatgctgtcatctccgttcgagacggcaagctctgcctgatgtggcgcgtgggtaacctgcgcaagagtcacattgtggaggcccacgtccgggcccagctcatcaaaccctacatgacacaggagggtgagtacctgccactggaccagcgggacctcaacgtgggctatgacatcggcctggaccgcatcttcttggtgtcacccatcatcatagtgcatgaaatcgacgaggacagcccactctacggcatgggcaaggaggagctggagtcagaggactttgagattgtggtcatcctggagggtatggtggaggccacggctatgaccactcaggcccgcagctcctatctggccagtgagatcctgtggggtcaccggtttgagcctgtggtcttcgaggaaaagagtcactacaaggtggactactcacgattccacaagacctatgaggtggctggcacgccttgctgctccgcccgtgagctgcaggagagcaagatcacggtgctgcccgccccaccgccccctcccagtgccttctgctatgagaatgagctggcccttatgagccaggaggaagaggagatggaagaggaggctgcggccgcagcagccgtggctgcaggcctgggcctggaggcaggttccaaagaggaggcaggcattatccggatgcttgagtttggcagccacctggatctggagcgcatgcaagccgccacccttccactggacaatatttcctatcgcagggaatctgccatctgacctccaggccctgccctcctctattcccgcaagagcctctgccaggggtgggacgccaggacaagccttccactcttaggacagagttgaacgtggctctgtggacctagaggaaggtgggggcttcaaagactgggagatcccttcctgttgactacagggcccaggactggaaaggacccaggtactccgccctgatggcccagggccccctggcatctccccacggtggctctgggcccccagatcttccacccttttcccactgacccttcaaggatgtaccccttctgctctcaggacctcggggaaggcggctggactgctggggggcgggcatcatggggttctgggtgggcagggtgggtctgggggagggggaagggtgtgtttcttttgcatgactgtggtctgtgctcttgattctcttttgtaaatatctataaatggaagagatggagacacaagtccacctctgcccatttctacctgtgagacagagagaggctgccaacccctctctgtgcactcccccgtccagcctcagcccgacccagctggctggtcccttgagacctttgaagccggctctgtatggtgttgggtttgggtacagaggggactcagaggtaggatgagtacccctccctccttgcagtccctccagtttccagattgatgacggcgtttgtaactatttttaataaagcatatggtccactagaagtaggctggtagagagaggagagagagagagagagagagagagagcgcaagcaagcatgtgagtatctgtatgtggccccttttctttaaaactagcgtgtgtgtgtgtgtgtgtgtgtgtgtgtgtgtgtgtgcgcgcgcgcgcgcgcaggtgcacatgtgtgtccttatggaagccaaaggacaacctcagatgttgtccttcgggggccatctacccttttttttaaaatttattttcattttcatgggcattccttccccccctccccctatgtatgtgtgtgcaactgatgcctgcagaggccaaaagatagcatggaatcctcagggcagggagttactgagggttgtgagccaccatgtggttctgggaatctaatctgggtcctctgcaaaagcaacaagtgcccttaaccgctgagccgcctctccagccccacccaccttattatttttttttttttttgaaacagggtctctcactggcctggagcacatgattagggtagctgaccagagagcccccggatctcctgtcgagggccagcttttttttttttcattaaaacacaggtgctggggatggaatctaggtcatgtgtgtctttcatcccttaggccttctcaggggtacatacccttccggagatacacagggacctctgccccctggtagtcaatggaaggaccctgggtgagtatcatagaagctaggtctgaatcaaatcttggtacctcagaggaagtaggaagcgcccactggattgacccacacgcagacgtacacacactcgtgtctctacacactgctcagggagcctgcaggacaccctggtgggaggggccccagaaacctactgagaacccggtttctgccttgccatgggacctctggtaagtccttctctctgagctccatagtttgtgttatgtgaagagccaacctgcatcaggtaaccgttacctgtccttcaaagtctgtgagtagccgagggctcccaggcatcaggagcccactctctgaggcaaaggggggggggaaccagacccgatctctgcggagtgtagcaagttagtgtcgagggctgcccgggagaaaagtgctggatggtctagccccatcccttcagccactctgttctacatgccaaccgtgtgcctagcattcaggctgtggaaaagcagaaagtaccctgtgtggtctcaggaacctctctgccaatataccagcttacctactgcgaaggaaggtgggtctatgacgatcacagaacaccagccatggccgcaagcaaccatttagataaatacagcacacccagcatgctttaaccatttgacaagggaatctgagagttctttcctggaaagaggctagcttgggatctaagacatcctccccccgccccccataggtagcttactgcagtcagtcaagggctgagttcacatcacatttgatggactaataagacatacagacctggagaactaaggactggacttcactatatacggctctgaggcctgcttctcctctcccatcctctgaggccagagatggacggaggggatgctgcctgccgtgtttccccaccctgggattccaagggtgccagtaaccattagcagcctccaagggctgaagcagaagatgagaggtagcattcagcaaaagaaaaggctcaatcaatggcctagccacccaggctcgccccaaacccaggaagcttctcagggatgccctaccttccagccccaggaggacacggggaggccctcctctcctgattgtcccaggtgatgggaaggaactgcctctgctccggtctcccactgggcccagaatgtggaacaggtatccacattcttcttgctgtccactccagcaagaggccaagtttagagggccacccagggacaagcctttcagcaccccgccccccaaacattgttaccagttagcctcttgcactgactgttgggggcaaccgtgtctttcagacaaccccattcttttctcaggccacaccaccaccacagctgccaccacgccagatccagggtgcaagagagctcaactgcaccgctccaggcaggctgcaagctgggctcagctctgctgactcacctctctcccacctgctcccctttcgcagccctcccacccgcttcccagctccgtgtgcagctcctctgatctctctctctctccttccctgctctcctggtggctgcatctgggggcggcgagcagcttcgataccttggtgctcagtcatgcaaactggttagcagctgcggggacttttggaggtgccaccacgcccttttctgctcagcccggggaagatgggccagccttgtctagcctagagcctgctcttcagtctggaagagagatcacgaaggacttgaagggagcacaggtgtaggaggggagggaagggcaggagggtgtggtctcactgaagctccgcccccgcacctgccggctgcctggaaaaactaccattcaagagtaatcttggctcgccatggcttcctccgagatggcttctggagttttccttaggaacttaaaacagcttagagagaactagagaggagcccaggtggcattcagctacgaattgtcactataaggcctttcttggatcatgcaggcttcttcctgcatgtagcttctctcatcttttctggatatgggctgttctgggcagtattgtatgttttgttagttttgtttgtttgttttaaagactaggtctcatgtagcccaggctggcctcaaactcagtgtgtagctaaagatgattgtgaactctggaccctcccgcttttgcctcccaagggctaatgttaaaggtgtgggtaccatcactcccaggcaaatcttccatttttggagtttgacaggagcagatggatctctgtgagttccaggctagcctggtctacctggcaagttccaggacagccacatacgaagactttatctcaaaaagcaaacaaaccccaaagatgaaagactggagcattcacatcctcccatgaaaataagctacaccttttaaggatgggaaggttttaacaccccagcttccctcctggtgtgaggaggaaggacagcgatcaagggacaatgaagtcaagacccttggcaccccatgtcccccaactgggagggaagactgagaggcagaggctcctaggttggaattttgcccttgggacttggcagctgtgtgaccttgggcaggtaaatttgtccgtgtgtgtgtgtgtgtgtgtgtgtgtgtgtgtgtgtgtgtgatattcatatatctatcttcattttgtatgaactaaatgagagcctgtgtgtgactgggcatggcaggtatgggggtctggtgttaaatgatctaaatcatctaaataaatgtgagtggcctttggaaacagtttgatcaacttaacaataaatgacacaattagtgtga

SEQ ID NO: 104 - RNA, 7039 nt, Mus musculus
  source 1..7039: mol_type = mRNA
tcacactaattgtgtcatttattgttaagttgatcaaactgtttccaaaggccactcacatttatttagatgatttagatcatttaacaccagacccccatacctgccatgcccagtcacacacaggctctcatttagttcatacaaaatgaagatagatatatgaatatcacacacacacacacacacacacacacacacacacacacacggacaaatttacctgcccaaggtcacacagctgccaagtcccaagggcaaaattccaacctaggagcctctgcctctcagtcttccctcccagttgggggacatggggtgccaagggtcttgacttcattgtcccttgatcgctgtccttcctcctcacaccaggagggaagctggggtgttaaaaccttcccatccttaaaaggtgtagcttattttcatgggaggatgtgaatgctccagtctttcatctttggggtttgtttgctttttgagataaagtcttcgtatgtggctgtcctggaacttgccaggtagaccaggctagcctggaactcacagagatccatctgctcctgtcaaactccaaaaatggaagatttgcctgggagtgatggtacccacacctttaacattagcccttgggaggcaaaagcgggagggtccagagttcacaatcatctttagctacacactgagtttgaggccagcctgggctacatgagacctagtctttaaaacaaacaaacaaaactaacaaaacatacaatactgcccagaacagcccatatccagaaaagatgagagaagctacatgcaggaagaagcctgcatgatccaagaaaggccttatagtgacaattcgtagctgaatgccacctgggctcctctctagttctctctaagctgttttaagttcctaaggaaaactccagaagccatctcggaggaagccatggcgagccaagattactcttgaatggtagtttttccaggcagccggcaggtgcgggggcggagcttcagtgagaccacaccctcctgcccttccctcccctcctacacctgtgctcccttcaagtccttcgtgatctctcttccagactgaagagcaggctctaggctagacaaggctggcccatcttccccgggctgagcagaaaagggcgtggtggcacctccaaaagtccccgcagctgctaaccagtttgcatgactgagcaccaaggtatcgaagctgctcgccgcccccagatgcagccaccaggagagcagggaaggagagagagagagatcagaggagctgcacacggagctgggaagcgggtgggagggctgcgaaaggggagcaggtgggagagaggtgagtcagcagagctgagcccagcttgcagcctgcctggagcggtgcagttgagctctcttgcaccctggatctggcgtggtggcagctgtggtggtggtgtggcctgagaaaagaatggggttgtctgaaagacacggttgcccccaacagtcagtgcaagaggctaactggtaacaatgtttggggggcggggtgctgaaaggcttgtccctgggtggccctctaaacttggcctcttgctggagtggacagcaagaagaatgtggatacctgttccacattctgggcccagtgggagaccggagcagaggcagttccttcccatcacctgggacaatcaggagaggagggcctccccgtgtcctcctggggctggaaggtagggcatccctgagaagcttcctgggtttggggcgagcctgggtggctaggccattgattgagccttttcttttgctgaatgctacctctcatcttctgcttcagcccttggaggctgctaatggttactggcacccttggaatcccagggtggggaaacacggcaggcagcatcccctccgtccatctctggcctcagaggatgggagaggagaagcaggcctcagagccgtatatagtgaagtccagtccttagttctccaggtctgtatgtcttattagtccatcaaatgtgatgtgaactcagcccttgactgactgcagtaagctacctatggggggcggggggaggatgtcttagatcccaagctagcctctttccaggaaagaactctcagattcccttgtcaaatggttaaagcatgctgggtgtgctgtatttatctaaatggttgcttgcggccatggctggtgttctgtgatcgtcatagacccaccttccttcgcagtaggtaagctggtatattggcagagaggttcctgagaccacacagggtactttctgcttttccacagcctgaatgctaggcacacggttggcatgtagaacagagtggctgaagggatggggctagaccatccagcacttttctcccgggcagccctcgacactaacttgctacactccgcagagatcgggtctggttcccccccccctttgcctcagagagtgggctcctgatgcctgggagccctcggctactcacagactttgaaggacaggtaacggttacctgatgcaggttggctcttcacataacacaaactatggagctcagagagaaggacttaccagaggtcccatggcaaggcagaaaccgggttctcagtaggtttctggggcccctcccaccagggtgtcctgcaggctccctgagcagtgtgtagagacacgagtgtgtgtacgtctgcgtgtgggtcaatccagtgggcgcttcctacttcctctgaggtaccaagatttgattcagacctagcttctatgatactcacccagggtccttccattgactaccagggggcagaggtccctgtgtatctccggaagggtatgtacccctgagaaggcctaagggatgaaagacacacatgacctagattccatccccagcacctgtgttttaatgaaaaaaaaaaaagctggccctcgacaggagatccgggggctctctggtcagctaccctaatcatgtgctccaggccagtgagagaccctgtttcaaaaaaaaaaaaaaataataaggtgggtggggctggagaggcggctcagcggttaagggcacttgttgcttttgcagaggacccagattagattcccagaaccacatggtggctcacaaccctcagtaactccctgccctgaggattccatgctatcttttggcctctgcaggcatcagttgcacacacatacatagggggagggggggaaggaatgcccatgaaaatgaaaataaattttaaaaaaaagggtagatggcccccgaaggacaacatctgaggttgtcctttggcttccataaggacacacatgtgcacctgcgcgcgcgcgcgcgcacacacacacacacacacacacacacacacacacacgctagttttaaagaaaaggggccacatacagatactcacatgcttgcttgcgctctctctctctctctctctctctctcctctctctaccagcctacttctagtggaccatatgctttattaaaaatagttacaaacgccgtcatcaatctggaaactggagggactgcaaggagggaggggtactcatcctacctctgagtcccctctgtacccaaacccaacaccatacagagccggcttcaaaggtctcaagggaccagccagctgggtcgggctgaggctggacgggggagtgcacagagaggggttggcagcctctctctgtctcacaggtagaaatgggcagaggtggacttgtgtctccatctcttccatttatagatatttacaaaagagaatcaagagcacagaccacagtcatgcaaaagaaacacacccttccccctcccccagacccaccctgcccacccagaaccccatgatgcccgccccccagcagtccagccgccttccccgaggtcctgagagcagaaggggtacatccttgaagggtcagtgggaaaagggtggaagatctgggggcccagagccaccgtggggagatgccagggggccctgggccatcagggcggagtacctgggtcctttccagtcctgggccctgtagtcaacaggaagggatctcccagtctttgaagcccccaccttcctctaggtccacagagccacgttcaactctgtcctaagagtggaaggcttgtcctggcgtcccacccctggcagaggctcttgcgggaatagaggagggcagggcctggaggtcagatggcagattccctgcgataggaaatattgtccagtggaagggtggcggcttgcatgcgctccagatccaggtggctgccaaactcaagcatccggataatgcctgcctcctctttggaacctgcctccaggcccaggcctgcagccacggctgctgcggccgcagcctcctcttccatctcctcttcctcctggctcataagggccagctcattctcatagcagaaggcactgggagggggcggtggggcgggcagcaccgtgatcttgctctcctgcagctcacgggcggagcagcaaggcgtgccagccacctcataggtcttgtggaatcgtgagtagtccaccttgtagtgactcttttcctcgaagaccacaggctcaaaccggtgaccccacaggatctcactggccagataggagctgcgggcctgagtggtcatagccgtggcctccaccataccctccaggatgaccacaatctcaaagtcctctgactccagctcctccttgcccatgccgtagagtgggctgtcctcgtcgatttcatgcactatgatgatgggtgacaccaagaagatgcggtccaggccgatgtcatagcccacgttgaggtcccgctggtccagtggcaggtactcaccctcctgtgtcatgtagggtttgatgagctgggcccggacgtgggcctccacaatgtgactcttgcgcaggttacccacgcgccacatcaggcagagcttgccgtctcgaacggagatgacagcatggtggctgaacagcagggtctgtgcccgcttcttgggccgtgccatcttggccatgatcgtgccaatcatgaaggagtcaatgacacagcccacaatggactggacaaccaccgcaatgaccgccaacgggcactcctctgtcacacaccggaacccgtagccaatggtcgtctgggtctccactgagaagaggaaggcccccaaaaagccgtttacgtgcatgatacagggtttgggggcattcgggcttgccccgccattgccccccgggcctcctgccgcgggcacagagggactggcctccaggtcaccatggaagaaggcaatgcaccagaagaggaggccgaagaagagccaggaaacgaggaaggccgcggagaagatcatgagcatatagcgccagcgcgtgtccacgcaggtggtgaagatgtctgccatgtagcgctgggacttgttgctcaggttggcgaagtagacgttacactggccgttcttcttgacaaagcggttgcggcgtttccgcctgggcacgtgggcctgcccgtttcggttgtgtccgtgcatgacctgaggacgtcgtcgtggtcacctggggagatgcagggcctgcaggcttgaaacctctaggcatggaaggttctgagaccaagcttctggggctggagtgagggacaggaccagaacagagacggagatggcccttggcatgtgcaaggcactttgcagtttgacagcttcttttaaacttggtgactatttcacacacttggtaagagctactctgagacattggtggtaatgttccatctcctagacctggagaggagtggggacttcaagaccacacagcaggttactaactgggctagtcctcgaaccagaggaggtgcgtgtggcctgtcttccacttgtctgcacagttctctgtccggaatatcagccacctgggacagagcctggctttgcccacttcacccagtgatactgggatgctgcctagctctccgtctccccaccttgatagcagggaaggaatccccaggagggtatctagccgcagctgatggccacactgaggctgggatgagtggaagaggagtttgctggatgcccgcgcaaggacgaaaggccgcggcgtggctcccctcctcatttggccagccgcgatctctctcctgcctcgctccgtggctcggctccagaaatcccggctccgggtcttggttcgcgcctcgtcactccggagacgcccggagcggcttgcggttgccgtgggaacctcgcccgggccaggcccggctcacgactcagccaccagactagagcagcgcgcggaccacagcgtttagggtttcgggaaaacgacacctgtccttagagtaactctccaagagtagcgagcacacacctcagaagcacagcgcggtgatgtgcggaaacccgcgtcacccccccacccccaccccgcacagtcaatcccgagcacttctagcggctgaattctaccgcgccaggaaggcgctactgaaccggaatccgccctcggaggctgcacggggtctgtttttgcaagccctccttgggtctcgggttcctgcgaaggggatcaaacagctgacaagtgattctttacgtgttccttcgaaacgctttgcttaactttggccctgtgactatcccagtaaaaatatacacacagactatggacgggagagaaacagtggtttaaacggagcagcttctcagttcggctgctgagactctaaactcctctgcctaacctgaagatcatctgttccaactcagagccgcgcagaggctctgggacagtgcgccatcgcctccctccttgttcgtaggcctttccttactccggctcttggctctggaggcaaactcctactactcaaaactcacttgccttgacacttttccttaattacaatcctgcatgcaacttcctcaaacaagatttcttatgctacccgctgggtcttacagtgttgtgaccagtccctccttccccactgggcacccaaagaaatcttgta

SEQ ID NO: 105 - RNA, 2656 nt, Rattus norvegicus
  source 1..2656: mol_type = mRNA
aggagagagatcgtggctggccaagtgaggggagccacgcggccttccgtcctttgtgcgggcatccgacaaactccactcccactcatcccagcctcagtgtggccatcagctgcggctggataccttcctgggcataccttctctggtttcaaggtggggagatggagggctaggcagtgtcccagtaccactgggtgaagtgggcaaagccaggccctgacttcggtggctgacattctgacagagaactgtgcagacaagtggaagacaggccacaggcaccttctctgaagtccccactcttttccaagtctgggaaatgggacagtaccaccaatgtctcagagtagctttcaccaagtgtgtgaagtagtcaccaactttaaaagaagctgccaaactacaaagtgccttgcacatgccaagggccatacccatctctgttctggtcctatccctcactccagccccaagggcagcctttgtgacagccagctgcaccgggaagcttggtctcagaaccttccatgcctagaggtttcaaccctgcaggccctgcatctccccaggtgaccacgacgacggcctcaggtcatgcacggacacagccgcaacgggcaggcccacgtgcccaggcggaaacgccgcaaccgcttcgtcaagaagaacggccagtgcaacgtgtacttcgccaacctgagcaacaagtcccagcgctacatggcggacatcttcacgacgtgcgtggacacgcgctggcgctacatgctcatgatcttctccgcggccttcctcgtttcctggctctttttcggcctccttttctggtgcattgcctttttccacggtgacctggagcctagtccctccgggcccacggcgggaggcccggggggcaatggcggcggggcagccccgacagcggccaaaccgtgtatcatgcatgtaaacggctttttgggagccttcctcttctcggtggagacacagacgaccatcggttatgggttccggtgtgtgacagaggagtgcccgttggcggtcatcgcagtggttgtccagtccattgtgggctgtgtcatcgactccttcatgattggtactatcatggccaagatggcacggcccaagaagcgggcgcagaccctgctgttcagccaccacgctgtcatctccgtgcgggacggcaagctctgcctgatgtggcgcgtgggcaacctgcgcaagagccacatcgtggaggcccacgtccgggcccagctcatcaagccctacatgacacaggagggtgagtacctgccactggaccagcgggacctcaacgtgggctatgacattggcctggaccgcatcttcttggtgtcacccatcatcatagtgcatgagattgatgaggacagtccactctacggcatgggcaaggaggaactggagtcggaggactttgagattgtggtcatcctggagggcatggtagaggccacggctatgaccacacaggcccgcagctcctacctggccagtgagatcctgtggggccaccggttcgagcctgtggtcttcgaggagaagagtcactacaaggtggactactcacggttccacaagacctacgaggtggctggcaccccttgctgctctgcccgtgagcttcaagagagcaagatcacggtgctgcccgccccaccgccccctcccagtgccttctgctatgagaacgagttggccctcatgagccaggaggaagaagaaatggaagaggaggctgctgccgcagcagccgtggctgccggcctgggcctggaggctggctccaaagaggagacaggcattatccggatgcttgagtttggcagccacctggatctggagcgcatgcaagccgctacccttcctctggacaacatttcttaccgcagggagtctgccatctgacctccaggccctgccctcctctatccctgcaagagcctctgccaggggtgggacatcaggacaagccttccactcttaggacagagttgttcatggctctgtggacctggaggaatgtgggggcttcaaagactgggagatcccctcctgttgactgcagggcccaggactgggaaggacccaggtactcagtcctgatggcctgggccccctggcatctccccacggtggctctgggcccccagatcttccacccttttcccactgacccttcaaggatgtaccccttctactctcaggaccttggggaaggcggctggactgctggggggtgggcatcatggggttctgggtgggcagggtgggtctgggggagggggaagggtgtgtttcttttgcatgactgtggtctgtgctcttgactctcttttgtaaatatctataaatggaagagatggagacacaagtccacctctgcccatttctacctgtgagacagagagaggccgccacccctctctgtgcacccccgtccagcctcagccctacccacctacccagctggctgggcctctgagacctttgaagccagctgtgtatggtgttggtttgggtagagaggggactcagacgtgggatgagtaccccctccctccttgcagtccccagattgatgatggcgtttgtaactatttttaataaagcatatggtccacta

SEQ ID NO: 106 - RNA, 2656 nt, Rattus norvegicus
  source 1..2656: mol_type = mRNA
tagtggaccatatgctttattaaaaatagttacaaacgccatcatcaatctggggactgcaaggagggagggggtactcatcccacgtctgagtcccctctctacccaaaccaacaccatacacagctggcttcaaaggtctcagaggcccagccagctgggtaggtgggtagggctgaggctggacgggggtgcacagagaggggtggcggcctctctctgtctcacaggtagaaatgggcagaggtggacttgtgtctccatctcttccatttatagatatttacaaaagagagtcaagagcacagaccacagtcatgcaaaagaaacacacccttccccctcccccagacccaccctgcccacccagaaccccatgatgcccaccccccagcagtccagccgccttccccaaggtcctgagagtagaaggggtacatccttgaagggtcagtgggaaaagggtggaagatctgggggcccagagccaccgtggggagatgccagggggcccaggccatcaggactgagtacctgggtccttcccagtcctgggccctgcagtcaacaggaggggatctcccagtctttgaagcccccacattcctccaggtccacagagccatgaacaactctgtcctaagagtggaaggcttgtcctgatgtcccacccctggcagaggctcttgcagggatagaggagggcagggcctggaggtcagatggcagactccctgcggtaagaaatgttgtccagaggaagggtagcggcttgcatgcgctccagatccaggtggctgccaaactcaagcatccggataatgcctgtctcctctttggagccagcctccaggcccaggccggcagccacggctgctgcggcagcagcctcctcttccatttcttcttcctcctggctcatgagggccaactcgttctcatagcagaaggcactgggagggggcggtggggcgggcagcaccgtgatcttgctctcttgaagctcacgggcagagcagcaaggggtgccagccacctcgtaggtcttgtggaaccgtgagtagtccaccttgtagtgactcttctcctcgaagaccacaggctcgaaccggtggccccacaggatctcactggccaggtaggagctgcgggcctgtgtggtcatagccgtggcctctaccatgccctccaggatgaccacaatctcaaagtcctccgactccagttcctccttgcccatgccgtagagtggactgtcctcatcaatctcatgcactatgatgatgggtgacaccaagaagatgcggtccaggccaatgtcatagcccacgttgaggtcccgctggtccagtggcaggtactcaccctcctgtgtcatgtagggcttgatgagctgggcccggacgtgggcctccacgatgtggctcttgcgcaggttgcccacgcgccacatcaggcagagcttgccgtcccgcacggagatgacagcgtggtggctgaacagcagggtctgcgcccgcttcttgggccgtgccatcttggccatgatagtaccaatcatgaaggagtcgatgacacagcccacaatggactggacaaccactgcgatgaccgccaacgggcactcctctgtcacacaccggaacccataaccgatggtcgtctgtgtctccaccgagaagaggaaggctcccaaaaagccgtttacatgcatgatacacggtttggccgctgtcggggctgccccgccgccattgccccccgggcctcccgccgtgggcccggagggactaggctccaggtcaccgtggaaaaaggcaatgcaccagaaaaggaggccgaaaaagagccaggaaacgaggaaggccgcggagaagatcatgagcatgtagcgccagcgcgtgtccacgcacgtcgtgaagatgtccgccatgtagcgctgggacttgttgctcaggttggcgaagtacacgttgcactggccgttcttcttgacgaagcggttgcggcgtttccgcctgggcacgtgggcctgcccgttgcggctgtgtccgtgcatgacctgaggccgtcgtcgtggtcacctggggagatgcagggcctgcagggttgaaacctctaggcatggaaggttctgagaccaagcttcccggtgcagctggctgtcacaaaggctgcccttggggctggagtgagggataggaccagaacagagatgggtatggcccttggcatgtgcaaggcactttgtagtttggcagcttcttttaaagttggtgactacttcacacacttggtgaaagctactctgagacattggtggtactgtcccatttcccagacttggaaaagagtggggacttcagagaaggtgcctgtggcctgtcttccacttgtctgcacagttctctgtcagaatgtcagccaccgaagtcagggcctggctttgcccacttcacccagtggtactgggacactgcctagccctccatctccccaccttgaaaccagagaaggtatgcccaggaaggtatccagccgcagctgatggccacactgaggctgggatgagtgggagtggagtttgtcggatgcccgcacaaaggacggaaggccgcgtggctcccctcacttggccagccacgatctctctcct

SEQ ID NO: 107 - RNA, 2171 nt, Macaca mulatta
  source 1..2171: mol_type = mRNA
cgggcccccggacccccgcgctctgagcccggccgagcccaacgatgctgacgccgaggcggcgcctagggcgcggcgcggggcagcgctgaaagttgggcggcccgcggggagcggcgcgggacggccgggacgcgcggagaccccaagacccacgcgcagaccgagcggcagccggggaggggggcgcgggccggccggccgagttcggaggcaggaggcaccgggactcccctctccgcgcccgggacgccgcccgccggatcccgccgtgggatgtagcgcccgctcgccgcctcccggactctcgtcggaccctccgcccagcggccctgcgtcttcccaggtgaccacgccggcttcaggacatgcacggacacagccgcaacggccaggcccacgtgccccggcggaaacgccgcaaccgctttgtcaagaagaacggccaatgcaatgtgtacttcgccaacctgagcaacaagtcgcagcgctacatggcggacatcttcaccacctgcgtggacacgcgctggcgctacatgctcatgatcttctccgcggccttccttgtttcctggctcttttttggcctcctcttctggtgtatcgccttcttccacggtgacctggaggccagcccaggggtgcccggggcgggcgggccggcggcgggcagtggcggggcagccccagcggcccccaagccctgcatcatgcacgtgaacggcttcctgggtgccttcctgttctcggtggagacgcagacgaccatcggctatgggttccggtgcgtgacggaggagtgcccgctggcagtcatcgctgtggtggtccagtccatcgtgggctgcgtcatcgactccttcatgatcggcaccatcatggccaagatggcgcggcccaagaagcgggcacagacgctgctgttcagccaccatgcggtcatctcggtgcgcgacggcaagctctgcctcatgtggcgcgtgggtaacctacgcaagagccacattgtggaggcccacgtgcgggcccagctcatcaagccctacatgacccaggagggtgagtacctgcccctggaccagcgggacctcaacgtgggctatgacatcggcctggaccgcatcttcctggtgtcgcccatcatcattgtccacgagatcgatgaggacagcccgctctatggcatgggcaaggaggagctggagtcagaggacttcgagatcgtggtcatcctggagggcatggtggaggccacggccatgaccacccaggcccgcagctcctacctggccagcgagatcctgtggggccaccgctttgagcccgtggtctttgaggagaagagccactacaaggtggactactcgcgttttcacaagacctacgaggtggccggcacaccctgctgctcggcccgggagctgcaggagagtaagatcaccgtgctgcccgccccgccgccccctcccagtgccttctgctatgagaacgagctggccctcatgagccaggaggaagaggagatggaggaggaggcggctgcggcggccgcagtggccgcaggcctgggcctggaggccggctccaaggaggaggcgggcatcatccggatgctggagttcggcagccacctggacctggagcgcatgcaggcttccctcccgctggacaacatctcctaccgcagggagtctgctatctgacctccaggcccggccctcaccactgcccacaagagcctctgccgggggtaggatgccaggacaccccctcccacactcaggacagagccaaccctggctccgtggaccttctggaggaaggtgggggtttcaaagactgggggaccccttcctcctgactccagcaccctggcctgggaagagctcggcccaatcagcctgggttcccccagcacctactcctggtggctctgggtccccggatccaccacccttcccccactgactcttcaaggacgtgccctctttgctctcagaaccttggggaaggtgactggactgctgggtgggagacatctcggggtttcagggtgggcagggggttagtttggggaggggggtgcgtttcttttgcatgactgtggcctgttgctcatgactttcttttgtaaatatctataaatggagacagatggagacaccaaa

SEQ ID NO: 108 - RNA, 2171 nt, Macaca mulatta
  source 1..2171: mol_type = mRNA
tttggtgtctccatctgtctccatttatagatatttacaaaagaaagtcatgagcaacaggccacagtcatgcaaaagaaacgcacccccctccccaaactaaccccctgcccaccctgaaaccccgagatgtctcccacccagcagtccagtcaccttccccaaggttctgagagcaaagagggcacgtccttgaagagtcagtgggggaagggtggtggatccggggacccagagccaccaggagtaggtgctgggggaacccaggctgattgggccgagctcttcccaggccagggtgctggagtcaggaggaaggggtcccccagtctttgaaacccccaccttcctccagaaggtccacggagccagggttggctctgtcctgagtgtgggagggggtgtcctggcatcctacccccggcagaggctcttgtgggcagtggtgagggccgggcctggaggtcagatagcagactccctgcggtaggagatgttgtccagcgggagggaagcctgcatgcgctccaggtccaggtggctgccgaactccagcatccggatgatgcccgcctcctccttggagccggcctccaggcccaggcctgcggccactgcggccgccgcagccgcctcctcctccatctcctcttcctcctggctcatgagggccagctcgttctcatagcagaaggcactgggagggggcggcggggcgggcagcacggtgatcttactctcctgcagctcccgggccgagcagcagggtgtgccggccacctcgtaggtcttgtgaaaacgcgagtagtccaccttgtagtggctcttctcctcaaagaccacgggctcaaagcggtggccccacaggatctcgctggccaggtaggagctgcgggcctgggtggtcatggccgtggcctccaccatgccctccaggatgaccacgatctcgaagtcctctgactccagctcctccttgcccatgccatagagcgggctgtcctcatcgatctcgtggacaatgatgatgggcgacaccaggaagatgcggtccaggccgatgtcatagcccacgttgaggtcccgctggtccaggggcaggtactcaccctcctgggtcatgtagggcttgatgagctgggcccgcacgtgggcctccacaatgtggctcttgcgtaggttacccacgcgccacatgaggcagagcttgccgtcgcgcaccgagatgaccgcatggtggctgaacagcagcgtctgtgcccgcttcttgggccgcgccatcttggccatgatggtgccgatcatgaaggagtcgatgacgcagcccacgatggactggaccaccacagcgatgactgccagcgggcactcctccgtcacgcaccggaacccatagccgatggtcgtctgcgtctccaccgagaacaggaaggcacccaggaagccgttcacgtgcatgatgcagggcttgggggccgctggggctgccccgccactgcccgccgccggcccgcccgccccgggcacccctgggctggcctccaggtcaccgtggaagaaggcgatacaccagaagaggaggccaaaaaagagccaggaaacaaggaaggccgcggagaagatcatgagcatgtagcgccagcgcgtgtccacgcaggtggtgaagatgtccgccatgtagcgctgcgacttgttgctcaggttggcgaagtacacattgcattggccgttcttcttgacaaagcggttgcggcgtttccgccggggcacgtgggcctggccgttgcggctgtgtccgtgcatgtcctgaagccggcgtggtcacctgggaagacgcagggccgctgggcggagggtccgacgagagtccgggaggcggcgagcgggcgctacatcccacggcgggatccggcgggcggcgtcccgggcgcggagaggggagtcccggtgcctcctgcctccgaactcggccggccggcccgcgcccccctccccggctgccgctcggtctgcgcgtgggtcttggggtctccgcgcgtcccggccgtcccgcgccgctccccgcgggccgcccaactttcagcgctgccccgcgccgcgccctaggcgccgcctcggcgtcagcatcgttgggctcggccgggctcagagcgcgggggtccgggggcccg

SEQ ID NO: 109 - RNA, 1969 nt, Macaca fascicularis
  source 1..1969: mol_type = mRNA
cgagttcggaggcaggaggcaccgggactcccctctccgcgcccgggacgccgcccgccggatcccgccgtgggatgtagcgcccgctcgccgcctcccggactctcgtcggaccctccgcccagcggccctgcgtcttcccaggtgaccacgccggcttcaggacatgcacggacacagccgcaacggccaggcccacgtgccccggcggaaacgccgcaaccgctttgtcaagaagaacggccaatgcaatgtgtacttcgccaacctgagcaacaagtcgcagcgctacatggcggacatcttcaccacctgcgtggacacgcgctggcgctacatgctcatgatcttctccgcggccttccttgtttcctggctcttttttggcctcctcttctggtgtatcgccttcttccacggtgacctggaggccagcccaggggtgcccggggcgggcgggccggcggcgggcagtggcggggcagccccggcggcccccaagccctgcatcatgcacgtgaacggcttcctgggtgccttcctgttctcggtggagacgcagacgaccatcggctatgggttccggtgcgtgacggaggagtgcccgctggcagtcatcgctgtggtggtccagtccatcgtgggctgcgtcatcgactccttcatgatcggcaccatcatggccaagatggcgcggcccaagaagcgggcacagacgctgctgttcagccaccatgcggtcatctcggtgcgcgacggcaagctctgcctcatgtggcgcgtgggtaacctacgcaagagccacattgtggaggcccacgtgcgggcccagctcatcaagccctacatgacccaggagggtgagtacctgcccctggaccagcgggacctcaacgtgggctatgacatcggcctggaccgcatcttcctggtgtcgcccatcatcattgtccacgagatcgatgaggacagcccgctctatggcatgggcaaggaggagctggagtcagaggacttcgagatcgtggtcatcctggagggcatggtggaggccacggccatgaccacccaggcccgcagctcctacctggccagcgagatcctgtggggccaccgctttgagcccgtggtctttgaggagaagagccactacaaggtggactactcgcgttttcacaagacctacgaggtggccggcacaccctgctgctcggcccgggagctgcaggagagtaagatcaccgtgctgcccgccccgccgccccctcccagtgccttctgctatgagaacgagctggccctcatgagccaggaggaagaggagatggaggaggaggcggctgcggcggccgcagtggccgcaggcctgggcctggaggccggctccaaggaggaggcgggcatcatccggatgctggagttcggcagccacctggacctggagcgcatgcaggcttccctcccgctggacaacatctcctaccgcagggagtctgctatctgacctccaggcccggccctcaccactgcccacaagagcctctgccgggggtaggatgccaggacaccccctcccacactcaggacagagccaaccctggctccgtggaccttctggaggaaggtgggggtttcaaagactgggggaccccttcctcctgactccagcaccctggcctgggaagagctcggcccaatcagcctgggttcccccagcacctactcctggtggctctgggtccccggatccaccacccttcccccactgactcttcaaggacgtgccctctttgctctcagaaccttggggaaggtgactggactgctgggtgggagacatctcggggtttcagggtgggcagggggttagtttggggaggggggtgcgtttcttttgcatgactgtggcctgttgctcatgactttcttttgtaaatatctataaatggagacagatggagacaccaaa

SEQ ID NO: 110 - RNA, 1969 nt, Macaca fascicularis
  source 1..1969: mol_type = mRNA
tttggtgtctccatctgtctccatttatagatatttacaaaagaaagtcatgagcaacaggccacagtcatgcaaaagaaacgcacccccctccccaaactaaccccctgcccaccctgaaaccccgagatgtctcccacccagcagtccagtcaccttccccaaggttctgagagcaaagagggcacgtccttgaagagtcagtgggggaagggtggtggatccggggacccagagccaccaggagtaggtgctgggggaacccaggctgattgggccgagctcttcccaggccagggtgctggagtcaggaggaaggggtcccccagtctttgaaacccccaccttcctccagaaggtccacggagccagggttggctctgtcctgagtgtgggagggggtgtcctggcatcctacccccggcagaggctcttgtgggcagtggtgagggccgggcctggaggtcagatagcagactccctgcggtaggagatgttgtccagcgggagggaagcctgcatgcgctccaggtccaggtggctgccgaactccagcatccggatgatgcccgcctcctccttggagccggcctccaggcccaggcctgcggccactgcggccgccgcagccgcctcctcctccatctcctcttcctcctggctcatgagggccagctcgttctcatagcagaaggcactgggagggggcggcggggcgggcagcacggtgatcttactctcctgcagctcccgggccgagcagcagggtgtgccggccacctcgtaggtcttgtgaaaacgcgagtagtccaccttgtagtggctcttctcctcaaagaccacgggctcaaagcggtggccccacaggatctcgctggccaggtaggagctgcgggcctgggtggtcatggccgtggcctccaccatgccctccaggatgaccacgatctcgaagtcctctgactccagctcctccttgcccatgccatagagcgggctgtcctcatcgatctcgtggacaatgatgatgggcgacaccaggaagatgcggtccaggccgatgtcatagcccacgttgaggtcccgctggtccaggggcaggtactcaccctcctgggtcatgtagggcttgatgagctgggcccgcacgtgggcctccacaatgtggctcttgcgtaggttacccacgcgccacatgaggcagagcttgccgtcgcgcaccgagatgaccgcatggtggctgaacagcagcgtctgtgcccgcttcttgggccgcgccatcttggccatgatggtgccgatcatgaaggagtcgatgacgcagcccacgatggactggaccaccacagcgatgactgccagcgggcactcctccgtcacgcaccggaacccatagccgatggtcgtctgcgtctccaccgagaacaggaaggcacccaggaagccgttcacgtgcatgatgcagggcttgggggccgccggggctgccccgccactgcccgccgccggcccgcccgccccgggcacccctgggctggcctccaggtcaccgtggaagaaggcgatacaccagaagaggaggccaaaaaagagccaggaaacaaggaaggccgcggagaagatcatgagcatgtagcgccagcgcgtgtccacgcaggtggtgaagatgtccgccatgtagcgctgcgacttgttgctcaggttggcgaagtacacattgcattggccgttcttcttgacaaagcggttgcggcgtttccgccggggcacgtgggcctggccgttgcggctgtgtccgtgcatgtcctgaagccggcgtggtcacctgggaagacgcagggccgctgggcggagggtccgacgagagtccgggaggcggcgagcgggcgctacatcccacggcgggatccggcgggcggcgtcccgggcgcggagaggggagtcccggtgcctcctgcctccgaactcg

SEQ ID NO: 111 - RNA, 4829 nt, Homo sapiens
  source 1..4829: mol_type = mRNA
gtcagagtcttccctcagctttgtacatcagcactgttttgatagataagagaggctactgtataagtgtgtaagatttgtaatggactgaggaatgcttgttctagctgctgaaactgactgtaactgtattgtcttaggagcatcatcatggggtctagtgccacagagattgaagaattggaaaacaccacttttaagtatcttacaggagaacagactgaaaaaatgtggcagcgcctgaaaggaatactaagatgcttggtgaagcagctggaaagaggtgatgttaacgtcgtcgacttaaagaagaatattgaatatgcggcatctgtgctggaagcagtttatatcgatgaaacaagaagacttctggatactgaagatgagctcagtgacattcagactgactcagtcccatctgaagtccgggactggttggcttctacctttacacggaaaatggggatgacaaaaaagaaacctgaggaaaaaccaaaatttcggagcattgtgcatgctgttcaagctggaatttttgtggaaagaatgtaccgaaaaacatatcatatggttggtttggcatatccagcagctgtcatcgtaacattaaaggatgttgataaatggtctttcgatgtatttgccctaaatgaagcaagtggagagcatagtctgaagtttatgatttatgaactgtttaccagatatgatcttatcaaccgtttcaagattcctgtttcttgcctaatcacctttgcagaagctttagaagttggttacagcaagtacaaaaatccatatcacaatttgattcatgcagctgatgtcactcaaactgtgcattacataatgcttcatacaggtatcatgcactggctcactgaactggaaattttagcaatggtctttgctgctgccattcatgattatgagcatacagggacaacaaacaactttcacattcagacaaggtcagatgttgccattttgtataatgatcgctctgtccttgagaatcaccacgtgagtgcagcttatcgacttatgcaagaagaagaaatgaatatcttgataaatttatccaaagatgactggagggatcttcggaacctagtgattgaaatggttttatctacagacatgtcaggtcacttccagcaaattaaaaatataagaaacagtttgcagcagcctgaagggattgacagagccaaaaccatgtccctgattctccacgcagcagacatcagccacccagccaaatcctggaagctgcattatcggtggaccatggccctaatggaggagtttttcctgcagggagataaagaagctgaattagggcttccattttccccactttgtgatcggaagtcaaccatggtggcccagtcacaaataggtttcatcgatttcatagtagagccaacattttctcttctgacagactcaacagagaaaattgttattcctcttatagaggaagcctcaaaagccgaaacttcttcctatgtggcaagcagctcaaccaccattgtggggttacacattgctgatgcactaagacgatcaaatacaaaaggctccatgagtgatgggtcctattccccagactactcccttgcagcagtggacctgaagagtttcaagaacaacctggtggacatcattcagcagaacaaagagaggtggaaagagttagctgcacaaggtgaatctgatcttcataagaactcagaagacttagtaaatgctgaagaaaaacatgatgagacacattcataggcccgaaacaccttaaagacttctgtcattttaaacatgagaggacaatgaaatcagcatgaaaacatcctaaattctcaactttccacaaagctatggctcttctttcaacatagaattggattgggccattttaattgactcctatacaaggaattaagaagaacataaattttgagctagtaactctggccaaataaatacactcaagtttttatcagagtttttggccagtgcttctgccatttttttccctccacaatttggccttcttcaatcaagccagataaatttttgagacaaaagtcagacagtttttaatttttcttgctttgaaccctgtcataatgactgtgcaatacatgtgcagaagatgaggtattttaaaatttacttccttgcactgtcttacacagagtgctataactataaatttttcaaggtcttaaataaaaggaagcaaaaacaaaattattgaaaaattttttttgttgtgctggggaatatactatttagattgtccttcttattttaaatgcatgggaacagaatgacaggtgggatgctgaggagctggttgaagcatcagagcaatgctacagtccaacaatggagcattagatccccagctaggtgacctgatgaacacctttgtaaactctcatactgggaaatggcagtgaaacctttttctgaacccgtggaccagcctgcgtccgtccccatggtttcaaagcacgaatgcattacctccatggttgtggttacaagcaagtcacatgctatctacagttcatgataacaagaccgtcaaccattgctggagacagacactagaatggaaaatgaaatttgccagcgggatgtttatcccatcagaatgtaacaaaatatattaccagccaagagataagagacaagaatgtgtgtgtgtgtgtgtgtgtgtgtgtgtgtgtgttcaaaaatgtctatgaaaatgaaaacccacacttttctgtacagataacattatttgatgtgacttttatattttactacacagaaacaaactgcagccctcagaggccctgcttccttgtcatgttttgcctgagcatgtgcaaagtctttcctttgcttaaagctgaaaaactacctttatgcattgttagctgacaagaaagatcaagcacaattagatgttgtaacttttcactgtacaagcattgcaatgattgtgagcttcagtgaatttatctttgtgaaaggtaaaaattggctggaaagaatcaggagtagccataaattaaatcatgcaaaggaggatccatgcatcctaacaagttttctgctgcatctgcttccttcctgggctccacaatgttaagcaatattttagaaaagggtacaattggaagcttttaagcctgagtggtgagattttataactcacaacttagatctcttttaatgtgtaagccatattctatatgcatatttattatgcatcattgtaatttaagatatatttggatgtaggctgtataaatgcttttaattgttctgtgaatagatccttagctttagtttcacctgaatcttgtgcaaaacacagctaaataattgaattgtattatagacattatgaggtaattgatcttttaaatgtaaggagtaagattgatctataataatgtgctggggaaaacatttatagatatgtacatcatggttactttttgtcctttcaaatggactttttatttctatttatggagagactgtaactactgcttttaatgtctttttaaagcaagctatttaccagcttgaaaatatcatgcatttaaaatagaatctatctggggagtctaattactattgttcctatttgagccagttgtctttcagtaaagctatagaatctctcaaagaagtaaatagaaatactacttcttaaatgtcataggaagcatatccactttgtttctattagtactttaagatctataagaccttattactaaaaagtagaggaatataaagaattcatcaatttctgtatatgggctttaacctaattttccaggttatgcgacttataaagcactgtgaccaaacttccagagacagtaaaaaaaaaaaaaagaaaaaaaagttttactccttcagaagtattgtcatgctactgctgtacttattttcctaatctctctctatctgctatactccctccttttctttctttttcttttaagcttttatatttattccttcctttgttttcctctctgtaagacagctactactgagcactaattagtagaaagtcagagtggaggttatctgtgcatgtctttctgcaaacattactgttgaggccatctgaagagagggattgataggttaggctgttgcaccgtgaatgtcctgctttgcatttttaacctcagctccccaacatatatatcttgcagtttatatgccttttcatttaaccgaaacctcttttatttaatttttaacataacaacctacaattcttgtgtttttattatgctgtatttttctgtgtttcttattacatgtgattgctaaataaatcatatttgagggaaaacattgtgaaacatttggtgttttatgcaattcaatttagtgaggcattgaaaagttggagaaattgggggaaacccaaaggagaccaacttaaaaattgatatgagtttggtaagaaagtgctttttgttccattaaataaatactgattgaattacttattattatacctattattcataagctcctggctggaagcatggtgcatatatgcatatggcaatatttcctctagaaatttcaagtcttataaaggagataatctacacagactgtaatttatacctaataactagaatgccacataaaaaagtaaccagttgcaaataaaatgcacctatgtatatttgaggaggtaaaaaactgcttctgtcttcagagctttcaggactaagtggtgcatcagttggcatttagtaaataaaaacaagtttataaacatt

SEQ ID NO: 112 - RNA, 4829 nt, Homo sapiens
  source 1..4829: mol_type = mRNA
aatgtttataaacttgtttttatttactaaatgccaactgatgcaccacttagtcctgaaagctctgaagacagaagcagttttttacctcctcaaatatacataggtgcattttatttgcaactggttacttttttatgtggcattctagttattaggtataaattacagtctgtgtagattatctcctttataagacttgaaatttctagaggaaatattgccatatgcatatatgcaccatgcttccagccaggagcttatgaataataggtataataataagtaattcaatcagtatttatttaatggaacaaaaagcactttcttaccaaactcatatcaatttttaagttggtctcctttgggtttcccccaatttctccaacttttcaatgcctcactaaattgaattgcataaaacaccaaatgtttcacaatgttttccctcaaatatgatttatttagcaatcacatgtaataagaaacacagaaaaatacagcataataaaaacacaagaattgtaggttgttatgttaaaaattaaataaaagaggtttcggttaaatgaaaaggcatataaactgcaagatatatatgttggggagctgaggttaaaaatgcaaagcaggacattcacggtgcaacagcctaacctatcaatccctctcttcagatggcctcaacagtaatgtttgcagaaagacatgcacagataacctccactctgactttctactaattagtgctcagtagtagctgtcttacagagaggaaaacaaaggaaggaataaatataaaagcttaaaagaaaaagaaagaaaaggagggagtatagcagatagagagagattaggaaaataagtacagcagtagcatgacaatacttctgaaggagtaaaacttttttttcttttttttttttttactgtctctggaagtttggtcacagtgctttataagtcgcataacctggaaaattaggttaaagcccatatacagaaattgatgaattctttatattcctctactttttagtaataaggtcttatagatcttaaagtactaatagaaacaaagtggatatgcttcctatgacatttaagaagtagtatttctatttacttctttgagagattctatagctttactgaaagacaactggctcaaataggaacaatagtaattagactccccagatagattctattttaaatgcatgatattttcaagctggtaaatagcttgctttaaaaagacattaaaagcagtagttacagtctctccataaatagaaataaaaagtccatttgaaaggacaaaaagtaaccatgatgtacatatctataaatgttttccccagcacattattatagatcaatcttactccttacatttaaaagatcaattacctcataatgtctataatacaattcaattatttagctgtgttttgcacaagattcaggtgaaactaaagctaaggatctattcacagaacaattaaaagcatttatacagcctacatccaaatatatcttaaattacaatgatgcataataaatatgcatatagaatatggcttacacattaaaagagatctaagttgtgagttataaaatctcaccactcaggcttaaaagcttccaattgtacccttttctaaaatattgcttaacattgtggagcccaggaaggaagcagatgcagcagaaaacttgttaggatgcatggatcctcctttgcatgatttaatttatggctactcctgattctttccagccaatttttacctttcacaaagataaattcactgaagctcacaatcattgcaatgcttgtacagtgaaaagttacaacatctaattgtgcttgatctttcttgtcagctaacaatgcataaaggtagtttttcagctttaagcaaaggaaagactttgcacatgctcaggcaaaacatgacaaggaagcagggcctctgagggctgcagtttgtttctgtgtagtaaaatataaaagtcacatcaaataatgttatctgtacagaaaagtgtgggttttcattttcatagacatttttgaacacacacacacacacacacacacacacacacacattcttgtctcttatctcttggctggtaatatattttgttacattctgatgggataaacatcccgctggcaaatttcattttccattctagtgtctgtctccagcaatggttgacggtcttgttatcatgaactgtagatagcatgtgacttgcttgtaaccacaaccatggaggtaatgcattcgtgctttgaaaccatggggacggacgcaggctggtccacgggttcagaaaaaggtttcactgccatttcccagtatgagagtttacaaaggtgttcatcaggtcacctagctggggatctaatgctccattgttggactgtagcattgctctgatgcttcaaccagctcctcagcatcccacctgtcattctgttcccatgcatttaaaataagaaggacaatctaaatagtatattccccagcacaacaaaaaaaatttttcaataattttgtttttgcttccttttatttaagaccttgaaaaatttatagttatagcactctgtgtaagacagtgcaaggaagtaaattttaaaatacctcatcttctgcacatgtattgcacagtcattatgacagggttcaaagcaagaaaaattaaaaactgtctgacttttgtctcaaaaatttatctggcttgattgaagaaggccaaattgtggagggaaaaaaatggcagaagcactggccaaaaactctgataaaaacttgagtgtatttatttggccagagttactagctcaaaatttatgttcttcttaattccttgtataggagtcaattaaaatggcccaatccaattctatgttgaaagaagagccatagctttgtggaaagttgagaatttaggatgttttcatgctgatttcattgtcctctcatgtttaaaatgacagaagtctttaaggtgtttcgggcctatgaatgtgtctcatcatgtttttcttcagcatttactaagtcttctgagttcttatgaagatcagattcaccttgtgcagctaactctttccacctctctttgttctgctgaatgatgtccaccaggttgttcttgaaactcttcaggtccactgctgcaagggagtagtctggggaataggacccatcactcatggagccttttgtatttgatcgtcttagtgcatcagcaatgtgtaaccccacaatggtggttgagctgcttgccacataggaagaagtttcggcttttgaggcttcctctataagaggaataacaattttctctgttgagtctgtcagaagagaaaatgttggctctactatgaaatcgatgaaacctatttgtgactgggccaccatggttgacttccgatcacaaagtggggaaaatggaagccctaattcagcttctttatctccctgcaggaaaaactcctccattagggccatggtccaccgataatgcagcttccaggatttggctgggtggctgatgtctgctgcgtggagaatcagggacatggttttggctctgtcaatcccttcaggctgctgcaaactgtttcttatatttttaatttgctggaagtgacctgacatgtctgtagataaaaccatttcaatcactaggttccgaagatccctccagtcatctttggataaatttatcaagatattcatttcttcttcttgcataagtcgataagctgcactcacgtggtgattctcaaggacagagcgatcattatacaaaatggcaacatctgaccttgtctgaatgtgaaagttgtttgttgtccctgtatgctcataatcatgaatggcagcagcaaagaccattgctaaaatttccagttcagtgagccagtgcatgatacctgtatgaagcattatgtaatgcacagtttgagtgacatcagctgcatgaatcaaattgtgatatggatttttgtacttgctgtaaccaacttctaaagcttctgcaaaggtgattaggcaagaaacaggaatcttgaaacggttgataagatcatatctggtaaacagttcataaatcataaacttcagactatgctctccacttgcttcatttagggcaaatacatcgaaagaccatttatcaacatcctttaatgttacgatgacagctgctggatatgccaaaccaaccatatgatatgtttttcggtacattctttccacaaaaattccagcttgaacagcatgcacaatgctccgaaattttggtttttcctcaggtttcttttttgtcatccccattttccgtgtaaaggtagaagccaaccagtcccggacttcagatgggactgagtcagtctgaatgtcactgagctcatcttcagtatccagaagtcttcttgtttcatcgatataaactgcttccagcacagatgccgcatattcaatattcttctttaagtcgacgacgttaacatcacctctttccagctgcttcaccaagcatcttagtattcctttcaggcgctgccacattttttcagtctgttctcctgtaagatacttaaaagtggtgttttccaattcttcaatctctgtggcactagaccccatgatgatgctcctaagacaatacagttacagtcagtttcagcagctagaacaagcattcctcagtccattacaaatcttacacacttatacagtagcctctcttatctatcaaaacagtgctgatgtacaaagctgagggaagactctgac

SEQ ID NO: 113 - RNA, 4514 nt, Mus musculus
  source 1..4514: mol_type = mRNA
atttttaagtgccgcttccagatcaattaagagacaaaagccttggtatttaaacaggcactttcttcccagggtggtgctgctggtactgcttcctaccatctggtttcttattacatcctgccctgcttcagctgctagagaggaattcagcttcttgtagagcgcgaaagtcattcacgtttctttcgtgcataattgagctcgtaaactgtagaaattctgatgtgcttctgtgcacggaacagttgcagatgagctgcttggcaaatagcctgagcagtcggtcagtagtacagtagcagctcacatgtgtggattgctcccgtgaggaacatcatcatggggtctactgatacggacatcgaagaattggaaaacgccacttacaagtatctcattggagaacagaccgagaagatgtggcagcgcctgaagggaatactaagatgcttagtgaagcagctggagaaaggtgatgtcaacgttgttgacctaaagaagaatatcgaatatgcagcatcagtactggaagctgtttacatcgatgagacaagaagactgctggacacagaggatgaactcagcgacatccagactgactccgtcccatcggaagtccgggattggttggcttcaactttcacacgcaaaatggggatgatgaaaaagaagcctgaagaaaaaccaaagtttcgcagcattgtccatgctgtccaggctgggatttttgtggaaaggatgtacaggaagaactatcacatggttggtttgacatatcctgcagctgtcatagtgacactcaaggaagttgataaatggtcttttgatgtatttgccttaaatgaagcaagcggggagcatagcctgaagtttatgatttatgaactctttaccagatatgatcttatcaaccgcttcaagattcctgtttcttgcctaattgcctttgcagaagccttagaagttggttacagcaagcacaaaaatccatatcataatttggtccatgcagctgacgtcactcaaactgtgcattatataatgcttcatacaggtatcatgcactggctcactgaactggaaattttagccatggtctttgcagctgccattcatgattatgagcacacaggaacaacaaacaacttccatattcagacgaggtcggacgttgctattctgtacaacgaccgctcagtgcttgagaatcaccacgtcagcgcagcctacagacttatgcaagaggaggaaatgaatattttggtaaatttgtctaaagatgactggagggatcttcggaacttagtgattgaaatggtcttagcgacagacatgtcagggcattttcagcaaattaaaaacataagaaacagcttgcagcagccggaagggattgacagagccaaaactatgtccctgatactccatgcagctgacatcagccacccagccaaaacttggaagttgcactacagatggaccatggccctaatggaggagtttttcctgcagggagacaaagaagctgaattagggcttccattttctccactttgtgatcggaagtcaacaatggttgcccagtcgcaaataggtttcattgatttcatagtggagccaacgttttctctcctgacggactcaacagagaaaattgtcattcctcttatagaggaagcttcaaagtcacagtcttcaaactacggggcaagcagctcgtccaccatgattgggttccatgttgctgactctctgaggcggtcaaatacaaaaggctccgtgtgtgatgggagctatgccccagactactcgctctcagctgtggatctgaagagtttcaaaaacaacctggtggacatcattcagcagaacaaagagaggtggaaagagttggctgcccaaggtgaacttgatcttcataagaactcagaagagttaggaaatactgaagaaaagcatgctgacacacgtccataggtgtgaacaaactttaagagttcagttgttttaaacacaacaggaaaatgaaagcagcatgaaaaacacacaaagaccttgattttctaaaaaaataaaataaaatgtttggctcagtccattttagtggactcctctgtaaggaagaaaagcataaatttcagtctagtaactgagccacaaagttcccacgagttatcattaggatcctggccactgtttttgccatggttttccttccatgatttggtcatcttagccagagaaatcttttaaggctgaaagctggatgctttcaagttttcatcatttttaacttgtatagaagatggaatggatttcaatatacaacttgcactgtgttactccagagtgacgcaacaacacaattgtcaacaagcaaggacaacaagaagaaaaacaaacaaacaaacaaaaaaagagtaaaagaaaggcaaaacaaaatgatgaaaaccctgttttcttgcaatgctgatctggtaagactgtcttgttttaaatgcatgggaacagaatgagaatcagatctgtcttcagaagcgccagcaacagctgaccgtaagacctgccgcacagtgattggatgaacgcctctatgggcctccagctgggaaactacagtgccatcttctcctgaagtcatcgaccatcctgcagccatccactgagttttaaggcactagtgtatcacccatgtgtgtgtggttatattataggtcgcagtttgctgtagggccaatgtaacaaggaacatcagccattgcaggagaagggcactcaaagagaagacagaattttccttctgggatgttgttaccactagaatataaagatatattacaggctgaggcataagatgtgtgtgtgtgtgtgtgtgtgtgtgtgtgtgtgtgtgtgtgtttgtgtctgtgtgtctgtgtgtctgtgtgtgtgtatgttgtagatgtgtgcactcgtgctcagaggtgtatatggaaacacatacttttctgtacagctaaaactgttatgtgatgtgactttttaattttactgaagagaaatgaactgcaaccctcagaggccctgcttcttggtcatgttttgcctgagcatgtgtgaagtagctaacaggaatggtcaagcccaattagatgttgtagtattttcactgtacatacagttcagggattgcgaacttcgtgaaaggtgacaattagatggaatgaacagttactgtcaattaggtgatgtgcagaaaggttcacccatcctaatgagttgcttctcgcacctgtgtttccccccaggttcctcaaggctaagcaatatttcagagagggacatgacaagaagcttttaagcctaagttgtgaggtctttataactcacaatttagatctactttaatgtgtaagccatattctctatgcatatttagtatgcatttattgtatttaagatatattgtgagtagactgtataaaatgcttttaaatgttctatgaattagattactagtgttattattgtctagatcttgttaaataattgaattgtattatagccattataatgtgatggatattttaaatatcaacagtaaagattgatctataataatgtgttgagattaatagaaatgtgtatgttagtagcctttgtcctttaaaatggacattttatttctatttatggagaaactgtaactactgcttttcaaatcttctttttaaaaatgagatatttactatctagaaaacattctgctttcaaagtaaaatctgagagtctaagaagtctaattactattgttcctaattgagccagttgtctttcagtaaagctagaatctaaggagagaagaataaaatgaagctctgctcctctcatggcgtagacaatacatctattttgttcctttgatctctatgcttggttaatgtaaattaaagaatatgcacattgatcagtgtatgtctgctagcctaattgtccaggctatgtgacttacagagcactgtgaccaaccgacttgcaggggtagctggggaggcacactgcttcagagccatcacactgcctggaccatgcacgctactcctcacctccctcccttttcttcctgtctccacgatgcccaatgtgtctgatattttgcctttggccttccacactccttccttcctctctccacaggacagctcctactggaagataataagtaggggtcacactggagatcacatgagcctccaaatatacagataatggtgtgaaaggccacaccatgaggcgggactatctctctccaaaggctgctgcacatgctttgcatttgtactcacagtgacccaccatatacttgcgagttcatctgccttttcatttagccagaactttactttttaacatgacaacctatgattcttgtgtttttattatgctgcgactctctgtatttcctactatatatgattgctgaataaatcatattcgatggaaattatcctgaaaaaaaaaaaaaaaaaaaa

SEQ ID NO: 114 - RNA, 4514 nt, Mus musculus
  source 1..4514: mol_type = mRNA
ttttttttttttttttttttcaggataatttccatcgaatatgatttattcagcaatcatatatagtaggaaatacagagagtcgcagcataataaaaacacaagaatcataggttgtcatgttaaaaagtaaagttctggctaaatgaaaaggcagatgaactcgcaagtatatggtgggtcactgtgagtacaaatgcaaagcatgtgcagcagcctttggagagagatagtcccgcctcatggtgtggcctttcacaccattatctgtatatttggaggctcatgtgatctccagtgtgacccctacttattatcttccagtaggagctgtcctgtggagagaggaaggaaggagtgtggaaggccaaaggcaaaatatcagacacattgggcatcgtggagacaggaagaaaagggagggaggtgaggagtagcgtgcatggtccaggcagtgtgatggctctgaagcagtgtgcctccccagctacccctgcaagtcggttggtcacagtgctctgtaagtcacatagcctggacaattaggctagcagacatacactgatcaatgtgcatattctttaatttacattaaccaagcatagagatcaaaggaacaaaatagatgtattgtctacgccatgagaggagcagagcttcattttattcttctctccttagattctagctttactgaaagacaactggctcaattaggaacaatagtaattagacttcttagactctcagattttactttgaaagcagaatgttttctagatagtaaatatctcatttttaaaaagaagatttgaaaagcagtagttacagtttctccataaatagaaataaaatgtccattttaaaggacaaaggctactaacatacacatttctattaatctcaacacattattatagatcaatctttactgttgatatttaaaatatccatcacattataatggctataatacaattcaattatttaacaagatctagacaataataacactagtaatctaattcatagaacatttaaaagcattttatacagtctactcacaatatatcttaaatacaataaatgcatactaaatatgcatagagaatatggcttacacattaaagtagatctaaattgtgagttataaagacctcacaacttaggcttaaaagcttcttgtcatgtccctctctgaaatattgcttagccttgaggaacctggggggaaacacaggtgcgagaagcaactcattaggatgggtgaacctttctgcacatcacctaattgacagtaactgttcattccatctaattgtcacctttcacgaagttcgcaatccctgaactgtatgtacagtgaaaatactacaacatctaattgggcttgaccattcctgttagctacttcacacatgctcaggcaaaacatgaccaagaagcagggcctctgagggttgcagttcatttctcttcagtaaaattaaaaagtcacatcacataacagttttagctgtacagaaaagtatgtgtttccatatacacctctgagcacgagtgcacacatctacaacatacacacacacagacacacagacacacagacacaaacacacacacacacacacacacacacacacacacacacacacatcttatgcctcagcctgtaatatatctttatattctagtggtaacaacatcccagaaggaaaattctgtcttctctttgagtgcccttctcctgcaatggctgatgttccttgttacattggccctacagcaaactgcgacctataatataaccacacacacatgggtgatacactagtgccttaaaactcagtggatggctgcaggatggtcgatgacttcaggagaagatggcactgtagtttcccagctggaggcccatagaggcgttcatccaatcactgtgcggcaggtcttacggtcagctgttgctggcgcttctgaagacagatctgattctcattctgttcccatgcatttaaaacaagacagtcttaccagatcagcattgcaagaaaacagggttttcatcattttgttttgcctttcttttactctttttttgtttgtttgtttgtttttcttcttgttgtccttgcttgttgacaattgtgttgttgcgtcactctggagtaacacagtgcaagttgtatattgaaatccattccatcttctatacaagttaaaaatgatgaaaacttgaaagcatccagctttcagccttaaaagatttctctggctaagatgaccaaatcatggaaggaaaaccatggcaaaaacagtggccaggatcctaatgataactcgtgggaactttgtggctcagttactagactgaaatttatgcttttcttccttacagaggagtccactaaaatggactgagccaaacattttattttatttttttagaaaatcaaggtctttgtgtgtttttcatgctgctttcattttcctgttgtgtttaaaacaactgaactcttaaagtttgttcacacctatggacgtgtgtcagcatgcttttcttcagtatttcctaactcttctgagttcttatgaagatcaagttcaccttgggcagccaactctttccacctctctttgttctgctgaatgatgtccaccaggttgtttttgaaactcttcagatccacagctgagagcgagtagtctggggcatagctcccatcacacacggagccttttgtatttgaccgcctcagagagtcagcaacatggaacccaatcatggtggacgagctgcttgccccgtagtttgaagactgtgactttgaagcttcctctataagaggaatgacaattttctctgttgagtccgtcaggagagaaaacgttggctccactatgaaatcaatgaaacctatttgcgactgggcaaccattgttgacttccgatcacaaagtggagaaaatggaagccctaattcagcttctttgtctccctgcaggaaaaactcctccattagggccatggtccatctgtagtgcaacttccaagttttggctgggtggctgatgtcagctgcatggagtatcagggacatagttttggctctgtcaatcccttccggctgctgcaagctgtttcttatgtttttaatttgctgaaaatgccctgacatgtctgtcgctaagaccatttcaatcactaagttccgaagatccctccagtcatctttagacaaatttaccaaaatattcatttcctcctcttgcataagtctgtaggctgcgctgacgtggtgattctcaagcactgagcggtcgttgtacagaatagcaacgtccgacctcgtctgaatatggaagttgtttgttgttcctgtgtgctcataatcatgaatggcagctgcaaagaccatggctaaaatttccagttcagtgagccagtgcatgatacctgtatgaagcattatataatgcacagtttgagtgacgtcagctgcatggaccaaattatgatatggatttttgtgcttgctgtaaccaacttctaaggcttctgcaaaggcaattaggcaagaaacaggaatcttgaagcggttgataagatcatatctggtaaagagttcataaatcataaacttcaggctatgctccccgcttgcttcatttaaggcaaatacatcaaaagaccatttatcaacttccttgagtgtcactatgacagctgcaggatatgtcaaaccaaccatgtgatagttcttcctgtacatcctttccacaaaaatcccagcctggacagcatggacaatgctgcgaaactttggtttttcttcaggcttctttttcatcatccccattttgcgtgtgaaagttgaagccaaccaatcccggacttccgatgggacggagtcagtctggatgtcgctgagttcatcctctgtgtccagcagtcttcttgtctcatcgatgtaaacagcttccagtactgatgctgcatattcgatattcttctttaggtcaacaacgttgacatcacctttctccagctgcttcactaagcatcttagtattcccttcaggcgctgccacatcttctcggtctgttctccaatgagatacttgtaagtggcgttttccaattcttcgatgtccgtatcagtagaccccatgatgatgttcctcacgggagcaatccacacatgtgagctgctactgtactactgaccgactgctcaggctatttgccaagcagctcatctgcaactgttccgtgcacagaagcacatcagaatttctacagtttacgagctcaattatgcacgaaagaaacgtgaatgactttcgcgctctacaagaagctgaattcctctctagcagctgaagcagggcaggatgtaataagaaaccagatggtaggaagcagtaccagcagcaccaccctgggaagaaagtgcctgtttaaataccaaggcttttgtctcttaattgatctggaagcggcacttaaaaat

SEQ ID NO: 115 - RNA, 2081 nt, Rattus norvegicus
  source 1..2081: mol_type = mRNA
gaggatagcctgaacagtcggtcagtagtacagtagcagctcacatgtgtggattgctcccgtgaggaacatcattatgggctctacagatacagacatcgaagaactggaaaacgccacttacaagtatctcattggagaacagaccgagaagatgtggcaacgcctgaaaggaatactaagatgcttagtgaagcagctggagaaaggtgatgtcaacgttgtcgacctaaagaagaatatcgaatatgcggcatctgtactggaagctgtttacatcgacgagacgaggaggcttctggatactgaggatgagctcagcgacattcagaccgactcggttccttcggaagtccgggactggttggcttcaacctttacacggaaaatggggatgacgaaaaagaaacccgaggaaaaaccgaagtttcgcagcattgtccacgctgtccaggctgggatttttgtggaaaggatgtacaggaagaactatcacatggttggtttgacatatcctgcagctgtcatagtgacactcaaggaagttgataaatggtcttttgatgtatttgccttaaatgaagcaagcggggagcatagtctgaagtttatgatttatgaactatttaccagtaatgatcttatcaaccgcttcaagattcctgtttcttgcctaattgcctttgcagaagctttagaagttggttacagcaagcacaaaaatccgtatcataatttggtccatgcagctgatgtcactcaaactgtgcattacataatgcttcatacaggtatcatgcactggctcactgaactggaaatcttagccatggtctttgcagccgccgttcatgactatgaacacacaggaactacaaacaacttccatattcagacgaggtcagacgtcgccattctgtataacgaccgctcagttcttgagaatcaccatgtcagcgcagcctacagacttatgcaagaggaggaaatgaatattttggtaaatttatctaaagatgactggagggatcttcggaacttagtgattgaaacggtcttagcaacagacatgtcaggccatttccagcaaattaaaaacataagaagcagcttgcagcagcctgaagggattgacagagccaaaacgatgtccctgatactccacgcagccgacatcagccacccagccaaaacgtggaagctgcactacaggtggactatggccttaatggaggaatttttcctgcagggagacaaagaagctgaattagggcttccgttttctccactttgtgatcggaagtcaacgatggttgcccagtctcaaataggtttcattgatttcatagtggagccaacgttttctctcctgacagactcgacagagaaaattgttattcctcttatagaggaagcttcaaaaccagagtcttctaactatggggcaagcagctcgtccaccatgattgggttccatgttgctgacgctctgaggcggtcaaacacaaaaggctgcatgagtgatgggacctatgccccagactactctctgtcagctgtggacctgaagagcttcaaaaacaacctggtggacatcattcagcagaacaaggagaggtggaaagagttggctgcccaaggcgaacttgatcttcataagaactcagaagacttagaagaaaagcatgctgacacacatccataggtgtgaacgaactttaagagttcagttattttaaacacaagaggaaaatgaaagcagcatgaaaaacatgcaaagaccttgatttttctgcaaaaaaatatatgtttggctcaggccattttagtcgactcctccataaggaacaagagcataagtttcactcttcttagctcagcaaagcagtacctgcaagttatcattaggattctggctgctgtttctgccatcgttctccctccatgatttggccatcttcaatgaagccagagaaatctggagactttcaactttccgtcatgtttgacttggcctgaagacagaatggttttcaatgcacttcttgcaccgtgtcactcaagaggacccacaaccacac

SEQ ID NO: 116 - RNA, 2081 nt, Rattus norvegicus
  source 1..2081: mol_type = mRNA
gtgtggttgtgggtcctcttgagtgacacggtgcaagaagtgcattgaaaaccattctgtcttcaggccaagtcaaacatgacggaaagttgaaagtctccagatttctctggcttcattgaagatggccaaatcatggagggagaacgatggcagaaacagcagccagaatcctaatgataacttgcaggtactgctttgctgagctaagaagagtgaaacttatgctcttgttccttatggaggagtcgactaaaatggcctgagccaaacatatatttttttgcagaaaaatcaaggtctttgcatgtttttcatgctgctttcattttcctcttgtgtttaaaataactgaactcttaaagttcgttcacacctatggatgtgtgtcagcatgcttttcttctaagtcttctgagttcttatgaagatcaagttcgccttgggcagccaactctttccacctctccttgttctgctgaatgatgtccaccaggttgtttttgaagctcttcaggtccacagctgacagagagtagtctggggcataggtcccatcactcatgcagccttttgtgtttgaccgcctcagagcgtcagcaacatggaacccaatcatggtggacgagctgcttgccccatagttagaagactctggttttgaagcttcctctataagaggaataacaattttctctgtcgagtctgtcaggagagaaaacgttggctccactatgaaatcaatgaaacctatttgagactgggcaaccatcgttgacttccgatcacaaagtggagaaaacggaagccctaattcagcttctttgtctccctgcaggaaaaattcctccattaaggccatagtccacctgtagtgcagcttccacgttttggctgggtggctgatgtcggctgcgtggagtatcagggacatcgttttggctctgtcaatcccttcaggctgctgcaagctgcttcttatgtttttaatttgctggaaatggcctgacatgtctgttgctaagaccgtttcaatcactaagttccgaagatccctccagtcatctttagataaatttaccaaaatattcatttcctcctcttgcataagtctgtaggctgcgctgacatggtgattctcaagaactgagcggtcgttatacagaatggcgacgtctgacctcgtctgaatatggaagttgtttgtagttcctgtgtgttcatagtcatgaacggcggctgcaaagaccatggctaagatttccagttcagtgagccagtgcatgatacctgtatgaagcattatgtaatgcacagtttgagtgacatcagctgcatggaccaaattatgatacggatttttgtgcttgctgtaaccaacttctaaagcttctgcaaaggcaattaggcaagaaacaggaatcttgaagcggttgataagatcattactggtaaatagttcataaatcataaacttcagactatgctccccgcttgcttcatttaaggcaaatacatcaaaagaccatttatcaacttccttgagtgtcactatgacagctgcaggatatgtcaaaccaaccatgtgatagttcttcctgtacatcctttccacaaaaatcccagcctggacagcgtggacaatgctgcgaaacttcggtttttcctcgggtttctttttcgtcatccccattttccgtgtaaaggttgaagccaaccagtcccggacttccgaaggaaccgagtcggtctgaatgtcgctgagctcatcctcagtatccagaagcctcctcgtctcgtcgatgtaaacagcttccagtacagatgccgcatattcgatattcttctttaggtcgacaacgttgacatcacctttctccagctgcttcactaagcatcttagtattcctttcaggcgttgccacatcttctcggtctgttctccaatgagatacttgtaagtggcgttttccagttcttcgatgtctgtatctgtagagcccataatgatgttcctcacgggagcaatccacacatgtgagctgctactgtactactgaccgactgttcaggctatcctc

SEQ ID NO: 117 - RNA, 2358 nt, Macaca mulatta
  source 1..2358: mol_type = mRNA
ctgtataagcgtgtaagatttgtaatggactgaggaatgcttgttctagctgctgaaactgactgtaactgtattgtcttaggagcatcatcatggggtctagtgccacagaaattgaagaattggaaaacaccacttttaagtatcttacaggagaacagactgaaaaaatgtggcagcgcctgaaaggaatattaagatgcttagtgaagcagctggaaagaggtgacgttaacgtcgttgacttaaagaagaatattgaatatgcggcatctgtgctggaagcagtttatatcgatgaaacaagaagacttctggatactgaagatgagctcagtgacattcagactgactcagtcccatctgaagtccgggactggttggcttctacctttacacggaaaatggggatgacaaaaaagaaacctgaggaaaaaccaaaatttcggagcattgtgcatgctgttcaagctggaatttttgtggaaaggatgtaccgaaaaacatatcatatggttggtttggcatatccagcagctgtcatcgtaacattaaaggatgttgataaatggtcttttgatgtatttgccctaaatgaagcaagtggagagcatagtctgaagtttatgatttatgaactgtttaccagatatgatcttatcaaccgtttcaagattcctgtttcttgcctaatcacctttgcagaagctttagaagttggttacagcaagtacaaaaatccatatcacaatttgattcatgcagctgatgtcactcaaactgtgcattacataatgcttcacacaggtatcatgcactggctcactgaactggaaattttagcaatggtctttgctgctgccattcatgattatgagcatacagggacaacaaacaactttcacattcagacaaggtcagatgttgccattttgtataatgatcgctctgtccttgagaatcaccatgtgagtgcagcttatcgacttatgcaagaagaagaaatgaatatcttggtaaatttatccaaagatgactggagggaccttcggaacctagtgattgaaatggttttatctacagacatgtcaggtcacttccagcaaattaaaaatataagaagcaatttgcagcagcctgaagggattgacagagccaaaaccatgtccctgattctccatgcagcagacatcagccacccagccaaatcctggaagctgcactatcggtggaccatggccctaatggaggagtttttcctgcagggagataaagaagctgaattagggcttcccttttccccactttgtgatcggaagtcaaccatggtggcccagtcacaaataggtttcatcgatttcatagtagagccaacattttctcttctgacagactcaacagagaaaattgttattcctcttatagaggaagcctcaaaagccgaaactacttcttcctatgtggcaagcagctcaaccaccattgtggggttacacattgctgatgcactaagacgaccaaatgcaaaaggttccatgagcgatgggtcctattcctcagactactcccttgcagcagtggacctgaagagcttcaagaacaacctggtggacatcattcagcagaacaaagagaggtggaaagagttagctgcacaaggtgaacctgatcttcataagaactcagaagacctagtaaatgctgaagaaaaacatgagacacattcataggcctgaaacaccttaaagacttctgtcattttaaacatgagaggacaatgaaaacagcatgaaaacatcctgagttctcaactttccacaaagctatagctcctctttcaacgtagaattggattgggccattttaattgactcctatacaaggaattaagaagaacataaattttgagctagcaactctggtcaaataaatacactcaagtttttatcagagtttttggccagtgcttgtgccatttttttccctccacaatttggccttcttcaatcaagccagaggaatttttgaaacaaaagtcagacagtttttaatttttcttgcttttactctgtcataatgactgtgcaatgcatgtgcagaagatgagatatttcaaaatttacttccttgcactgtcttacacagagtgctataagtataaatttttcaaggtcttaaataaaaggaagcaaaaacaacattatggaaaaaaatttttttgctgtgctggggaatagactatttagattgtccttcttattttaaatgtatgggaatggaatgacaggcgggatgctgaggagctggttgaagcatcagagcaatgctacaatccaacagtggagcattagatcccca

SEQ ID NO: 118 - RNA, 2358 nt, Macaca mulatta
  source 1..2358: mol_type = mRNA
tggggatctaatgctccactgttggattgtagcattgctctgatgcttcaaccagctcctcagcatcccgcctgtcattccattcccatacatttaaaataagaaggacaatctaaatagtctattccccagcacagcaaaaaaatttttttccataatgttgtttttgcttccttttatttaagaccttgaaaaatttatacttatagcactctgtgtaagacagtgcaaggaagtaaattttgaaatatctcatcttctgcacatgcattgcacagtcattatgacagagtaaaagcaagaaaaattaaaaactgtctgacttttgtttcaaaaattcctctggcttgattgaagaaggccaaattgtggagggaaaaaaatggcacaagcactggccaaaaactctgataaaaacttgagtgtatttatttgaccagagttgctagctcaaaatttatgttcttcttaattccttgtataggagtcaattaaaatggcccaatccaattctacgttgaaagaggagctatagctttgtggaaagttgagaactcaggatgttttcatgctgttttcattgtcctctcatgtttaaaatgacagaagtctttaaggtgtttcaggcctatgaatgtgtctcatgtttttcttcagcatttactaggtcttctgagttcttatgaagatcaggttcaccttgtgcagctaactctttccacctctctttgttctgctgaatgatgtccaccaggttgttcttgaagctcttcaggtccactgctgcaagggagtagtctgaggaataggacccatcgctcatggaaccttttgcatttggtcgtcttagtgcatcagcaatgtgtaaccccacaatggtggttgagctgcttgccacataggaagaagtagtttcggcttttgaggcttcctctataagaggaataacaattttctctgttgagtctgtcagaagagaaaatgttggctctactatgaaatcgatgaaacctatttgtgactgggccaccatggttgacttccgatcacaaagtggggaaaagggaagccctaattcagcttctttatctccctgcaggaaaaactcctccattagggccatggtccaccgatagtgcagcttccaggatttggctgggtggctgatgtctgctgcatggagaatcagggacatggttttggctctgtcaatcccttcaggctgctgcaaattgcttcttatatttttaatttgctggaagtgacctgacatgtctgtagataaaaccatttcaatcactaggttccgaaggtccctccagtcatctttggataaatttaccaagatattcatttcttcttcttgcataagtcgataagctgcactcacatggtgattctcaaggacagagcgatcattatacaaaatggcaacatctgaccttgtctgaatgtgaaagttgtttgttgtccctgtatgctcataatcatgaatggcagcagcaaagaccattgctaaaatttccagttcagtgagccagtgcatgatacctgtgtgaagcattatgtaatgcacagtttgagtgacatcagctgcatgaatcaaattgtgatatggatttttgtacttgctgtaaccaacttctaaagcttctgcaaaggtgattaggcaagaaacaggaatcttgaaacggttgataagatcatatctggtaaacagttcataaatcataaacttcagactatgctctccacttgcttcatttagggcaaatacatcaaaagaccatttatcaacatcctttaatgttacgatgacagctgctggatatgccaaaccaaccatatgatatgtttttcggtacatcctttccacaaaaattccagcttgaacagcatgcacaatgctccgaaattttggtttttcctcaggtttcttttttgtcatccccattttccgtgtaaaggtagaagccaaccagtcccggacttcagatgggactgagtcagtctgaatgtcactgagctcatcttcagtatccagaagtcttcttgtttcatcgatataaactgcttccagcacagatgccgcatattcaatattcttctttaagtcaacgacgttaacgtcacctctttccagctgcttcactaagcatcttaatattcctttcaggcgctgccacattttttcagtctgttctcctgtaagatacttaaaagtggtgttttccaattcttcaatttctgtggcactagaccccatgatgatgctcctaagacaatacagttacagtcagtttcagcagctagaacaagcattcctcagtccattacaaatcttacacgcttatacag

SEQ ID NO: 119 - RNA, 2392 nt, Macaca fascicularis
  source 1..2392: mol_type = mRNA
acatcctgccctcgttctgttggtagagaggaattcagcttcttctggagcgcgaaagtcattcacgtttctcttgtgcataatagagctcgtaaactgtaggaattctgatgtgcttcagtgcacagaacagtaacaaatgagctgcttttggggagagcttgagtactcagtcggtcagtagtacagtagcaggctcacatgtacggattgttcttgtgaggagcatcatcatggggtctagtgccacagaaattgaagaattggaaaacaccacttttaagtatcttacaggagaacagactgaaaaaatgtggcagcgcctgaaaggaatattaagatgcttagtgaagcagctggaaagaggtgacgttaacgtcgttgacttaaagaagaatattgaatatgcggcatctgtgctggaagcagtttatatcgatgaaacaagaagacttctggatactgaagatgagctcagtgacattcagactgactcagtcccatctgaagtccgggactggttggcttctacctttacacggaaaatggggatgacaaaaaagaaacctgaggagaaaccaaaatttcggagcattgtgcatgctgttcaagctggaatttttgtggaaaggatgtaccgaaaaacatatcatatggttggtttggcatatccagcagctgtcatcgtaacattaaaggatgttgataaatggtcttttgatgtatttgccctaaatgaagcaagtggagagcatagtctgaagtttatgatttatgaactgtttaccagatatgatcttatcaaccgtttcaagattcctgtttcttgcctaatcacctttgcagaagctttagaagttggttacagcaagtacaaaaatccatatcacaatttgattcatgcagctgatgtcactcaaactgtgcattacataatgcttcacacaggtatcatgcactggctcactgaactggaaattttagcaatggtctttgctgctgccattcatgattatgagcatacagggacaacaaacaactttcacattcagacaaggtcagatgttgccattttgtataatgatcgctctgtccttgagaatcaccatgtgagtgcagcttatcgacttatgcaagaagaagaaatgaatatcttggtaaatttatccaaagatgactggagggaccttcggaacctagtgattgaaatggttttatctacagacatgtcaggtcacttccagcaaattaaaaatataagaagcaatttgcagcagcctgaagggatcgacagagccaaaaccatgtccctgattctccatgcagcagacatcagccacccagccaaatcctggaagctgcactatcggtggaccatggccctaatggaggagtttttcctgcagggagataaagaagctgaattagggcttcccttttccccactttgtgatcggaagtcaaccatggtggcccagtcacaaataggtttcatcgatttcatagtagagccaacattttctcttctgacagactcaacagagaaaattgttattcctcttatagaggaagcctcaaaagccgaaactacttcttcctatgtggcaagcagctcaaccaccattgtggggttacacattgctgatgcactaagacgaccaaatgcaaaaggttccatgagcgatgggtcctattcctcagactactcccttgcagcagtggacctgaagagcttcaagaacaacctggtggacatcattcagcagaacaaagagaggtggaaagagttagctgcacaagcttcatcttcagatcatgttctacatcatgttagcagtacaatagagcaggagtatgcatttgatagagtggaactttcagaagataagaatcatgaagttctaagaagcgatattcagtcacttaaccctagaagagcttaaataattgtttgaatggagattaaggaatgatagagcacaattccacctgaaaatcatgttataacctatgtgacagcattagcccttccagaagcaagaaccagttcacagaagtgtgagtttatccatcagtaaacacctttaagtaaaacctcatgcaaaaggtggcagctctaatttgaccaaaaggcttggcgattttgatatgcttgctggaaatctaccttgccctgtgtgagaaagggaatccatttttgcagattgctcaataagcatcatgagccatataaataacagctgtaaactccttaattcaccgggctcaaccactatcgaacagattcatctagtggctacatcagcaccttgtgctttcaaatatctgtttcaatgggattttgtggcatttgtctttaccgagtgccaataaattttctttgagcaactaa

SEQ ID NO: 120 - RNA, 2392 nt, Macaca fascicularis
  source 1..2392: mol_type = mRNA
ttagttgctcaaagaaaatttattggcactcggtaaagacaaatgccacaaaatcccattgaaacagatatttgaaagcacaaggtgctgatgtagccactagatgaatctgttcgatagtggttgagcccggtgaattaaggagtttacagctgttatttatatggctcatgatgcttattgagcaatctgcaaaaatggattccctttctcacacagggcaaggtagatttccagcaagcatatcaaaatcgccaagccttttggtcaaattagagctgccaccttttgcatgaggttttacttaaaggtgtttactgatggataaactcacacttctgtgaactggttcttgcttctggaagggctaatgctgtcacataggttataacatgattttcaggtggaattgtgctctatcattccttaatctccattcaaacaattatttaagctcttctagggttaagtgactgaatatcgcttcttagaacttcatgattcttatcttctgaaagttccactctatcaaatgcatactcctgctctattgtactgctaacatgatgtagaacatgatctgaagatgaagcttgtgcagctaactctttccacctctctttgttctgctgaatgatgtccaccaggttgttcttgaagctcttcaggtccactgctgcaagggagtagtctgaggaataggacccatcgctcatggaaccttttgcatttggtcgtcttagtgcatcagcaatgtgtaaccccacaatggtggttgagctgcttgccacataggaagaagtagtttcggcttttgaggcttcctctataagaggaataacaattttctctgttgagtctgtcagaagagaaaatgttggctctactatgaaatcgatgaaacctatttgtgactgggccaccatggttgacttccgatcacaaagtggggaaaagggaagccctaattcagcttctttatctccctgcaggaaaaactcctccattagggccatggtccaccgatagtgcagcttccaggatttggctgggtggctgatgtctgctgcatggagaatcagggacatggttttggctctgtcgatcccttcaggctgctgcaaattgcttcttatatttttaatttgctggaagtgacctgacatgtctgtagataaaaccatttcaatcactaggttccgaaggtccctccagtcatctttggataaatttaccaagatattcatttcttcttcttgcataagtcgataagctgcactcacatggtgattctcaaggacagagcgatcattatacaaaatggcaacatctgaccttgtctgaatgtgaaagttgtttgttgtccctgtatgctcataatcatgaatggcagcagcaaagaccattgctaaaatttccagttcagtgagccagtgcatgatacctgtgtgaagcattatgtaatgcacagtttgagtgacatcagctgcatgaatcaaattgtgatatggatttttgtacttgctgtaaccaacttctaaagcttctgcaaaggtgattaggcaagaaacaggaatcttgaaacggttgataagatcatatctggtaaacagttcataaatcataaacttcagactatgctctccacttgcttcatttagggcaaatacatcaaaagaccatttatcaacatcctttaatgttacgatgacagctgctggatatgccaaaccaaccatatgatatgtttttcggtacatcctttccacaaaaattccagcttgaacagcatgcacaatgctccgaaattttggtttctcctcaggtttcttttttgtcatccccattttccgtgtaaaggtagaagccaaccagtcccggacttcagatgggactgagtcagtctgaatgtcactgagctcatcttcagtatccagaagtcttcttgtttcatcgatataaactgcttccagcacagatgccgcatattcaatattcttctttaagtcaacgacgttaacgtcacctctttccagctgcttcactaagcatcttaatattcctttcaggcgctgccacattttttcagtctgttctcctgtaagatacttaaaagtggtgttttccaattcttcaatttctgtggcactagaccccatgatgatgctcctcacaagaacaatccgtacatgtgagcctgctactgtactactgaccgactgagtactcaagctctccccaaaagcagctcatttgttactgttctgtgcactgaagcacatcagaattcctacagtttacgagctctattatgcacaagagaaacgtgaatgactttcgcgctccagaagaagctgaattcctctctaccaacagaacgagggcaggatgt

SEQ ID NO: 121 - protein, 36 aa, synthetic construct
  SITE 36: note = C-terminal amide
  SITE 1: note = 6-azidohexan-1-oyl N-terminal amide
  DISULFID 2..27: note = Intrachain crosslink
  DISULFID 17..29: note = Intrachain crosslink
  DISULFID 23..35: note = Intrachain crosslink
GCILNGRTDLGTLLFRCRRDSDCPGACICRGNGYCG

SEQ ID NO: 122 - protein, 9 aa, synthetic construct
  REGION 1..9: note = circular
  SITE 8: note = D-proline
  SITE 9: note = N-methyllysine
  SITE 9: note = N-epsilon amide with 22-azido-17-oxo-4,7,10,13-tetraoxa-16-aza-docosanoic acid
FRGDLAFPK

SEQ ID NO: 123 - protein, 12 aa, synthetic construct
  SITE 1: note = (S)-2-amino-6-azidohexanoic acid
  REGION 1..12: note = circular peptide
XGPGRGDQTTLA

SEQ ID NO: 124 - protein, 16 aa, synthetic construct
  REGION 1..16: note = circular peptide
  SITE 1: note = (S)-2-amino-6-azidohexanoic acid
XAQGPGRGDQTTLAQA

SEQ ID NO: 125 - protein, 20 aa, synthetic construct
  REGION 1..20: note = circular peptide
  SITE 1: note = (S)-2-amino-6-azidohexanoic acid
XQSAQGPGRGDQTTLAQAQA

SEQ ID NO: 126 - protein, 24 aa, synthetic construct
  SITE 1: note = (S)-2-amino-6-azidohexanoic acid
  REGION 1..24: note = circular peptide
XNHQSAQGPGRGDQTTLAQAQTGA

SEQ ID NO: 127 - protein, 28 aa, synthetic construct
  REGION 1..28: note = circular peptide
  SITE 1: note = (S)-2-amino-6-azidohexanoic acid
XATNHQSAQGPGRGDQTTLAQAQTGWVA

SEQ ID NO: 128 - protein, 32 aa, synthetic construct
  REGION 1..32: note = circular peptide
  SITE 1: note = (S)-2-amino-6-azidohexanoic acid
XQVATNHQSAQGPGRGDQTTLAQAQTGWVQNA

SEQ ID NO: 129 - protein, 12 aa, synthetic construct
  REGION 1..12: note = circular peptide
  SITE 1: note = (S)-2-amino-6-azidohexanoic acid
XGPGAGAQTTLA

SEQ ID NO: 130 - protein, 32 aa, synthetic construct
  REGION 1..32: note = circular peptide
  SITE 1: note = (S)-2-amino-6-azidohexanoic acid
XQVATNHQSAQGPGAGAQTTLAQAQTGWVQNA

SEQ ID NO: 131 - RNA, 21 nt, synthetic construct
  source 1..21: mol_type = other RNA
  modified_base 1: mod_base = OTHER; note = 2'-O-methylcytidine-3'-phosphorothioate
  modified_base 2: mod_base = OTHER; note = 2'-O-methyladenosine-3'-phosphorothioate
  modified_base 3: mod_base = OTHER; note = 2'-O-methyluridine-3'-phosphate
  modified_base 4: mod_base = OTHER; note = 2'-O-methyluridine-3'-phosphate
  modified_base 5: mod_base = OTHER; note = 2'-O-methyluridine-3'-phosphate
  modified_base 6: mod_base = OTHER; note = 2'-O-methyluridine-3'-phosphate
  modified_base 7: mod_base = OTHER; note = 2'-deoxy-2'-fluoroadenosine-3'-phosphate
  modified_base 8: mod_base = OTHER; note = 2'-O-methyladenosine-3'-phosphate
  modified_base 9: mod_base = OTHER; note = 2'-deoxy-2'-fluorouridine-3'-phosphate
  modified_base 10: mod_base = OTHER; note = 2'-deoxy-2'-fluorocytidine-3'-phosphate
  modified_base 11: mod_base = OTHER; note = 2'-deoxy-2'-fluorocytidine-3'-phosphate
  modified_base 12: mod_base = OTHER; note = 2'-O-methyluridine-3'-phosphate
  modified_base 13: mod_base = OTHER; note = 2'-O-methylcytidine-3'-phosphate
  modified_base 14: mod_base = OTHER; note = 2'-O-methyladenosine-3'-phosphate
  modified_base 15: mod_base = OTHER; note = 2'-O-methylcytidine-3'-phosphate
  modified_base 16: mod_base = OTHER; note = 2'-O-methyluridine-3'-phosphate
  modified_base 17: mod_base = OTHER; note = 2'-O-methylcytidine-3'-phosphate
  modified_base 18: mod_base = OTHER; note = 2'-O-methyluridine-3'-phosphate
  modified_base 19: mod_base = OTHER; note = 2'-O-methyladenosine-3'-phosphate
  modified_base 20: mod_base = OTHER; note = 2'-O-methyladenosine-3'-phosphorothioate
  modified_base 21: mod_base = OTHER; note = 2'-O-methyladenosine-3'-phosphorothioate (1-(6-(6-(dibenzo[b,f]azacyclooct-4-yn-5-yl)-6-oxohexan-1-o ylamino)hexan-1-oyl)-4R-hydroxypyrrolidin-2S-yl)methyl ester, click conjugate triazole formed between the dibenzoazacyclooctyne group and the azide group of SEQ ID NO: 122
cattttaatcctcactctaaa

SEQ ID NO: 132 - RNA, 21 nt, synthetic construct
  source 1..21: mol_type = other RNA
  modified_base 1: mod_base = OTHER; note = 2'-O-methylcytidine-3'-phosphorothioate
  modified_base 2: mod_base = OTHER; note = 2'-O-methyladenosine-3'-phosphorothioate
  modified_base 3: mod_base = OTHER; note = 2'-O-methyluridine-3'-phosphate
  modified_base 4: mod_base = OTHER; note = 2'-O-methyluridine-3'-phosphate
  modified_base 5: mod_base = OTHER; note = 2'-O-methyluridine-3'-phosphate
  modified_base 6: mod_base = OTHER; note = 2'-O-methyluridine-3'-phosphate
  modified_base 7: mod_base = OTHER; note = 2'-deoxy-2'-fluoroadenosine-3'-phosphate
  modified_base 8: mod_base = OTHER; note = 2'-O-methyladenosine-3'-phosphate
  modified_base 9: mod_base = OTHER; note = 2'-deoxy-2'-fluorouridine-3'-phosphate
  modified_base 10: mod_base = OTHER; note = 2'-deoxy-2'-fluorocytidine-3'-phosphate
  modified_base 11: mod_base = OTHER; note = 2'-deoxy-2'-fluorocytidine-3'-phosphate
  modified_base 12: mod_base = OTHER; note = 2'-O-methyluridine-3'-phosphate
  modified_base 13: mod_base = OTHER; note = 2'-O-methylcytidine-3'-phosphate
  modified_base 14: mod_base = OTHER; note = 2'-O-methyladenosine-3'-phosphate
  modified_base 15: mod_base = OTHER; note = 2'-O-methylcytidine-3'-phosphate
  modified_base 16: mod_base = OTHER; note = 2'-O-methyluridine-3'-phosphate
  modified_base 17: mod_base = OTHER; note = 2'-O-methylcytidine-3'-phosphate
  modified_base 18: mod_base = OTHER; note = 2'-O-methyluridine-3'-phosphate
  modified_base 19: mod_base = OTHER; note = 2'-O-methyladenosine-3'-phosphate
  modified_base 20: mod_base = OTHER; note = 2'-O-methyladenosine-3'-phosphorothioate
  modified_base 21: mod_base = OTHER; note = 2'-O-methyladenosine-3'-phosphorothioate (1-(6-(6-(dibenzo[b,f]azacyclooct-4-yn-5-yl)-6-oxohexan-1-o ylamino)hexan-1-oyl)-4R-hydroxypyrrolidin-2S-yl)methyl ester, click conjugate triazole formed between the dibenzoazacyclooctyne group and the azide group of SEQ ID NO: 121
cattttaatcctcactctaaa

SEQ ID NO: 133 - RNA, 21 nt, synthetic construct
  source 1..21: mol_type = other RNA
  modified_base 1: mod_base = OTHER; note = 2'-O-methylcytidine-3'-phosphorothioate
  modified_base 2: mod_base = OTHER; note = 2'-O-methyladenosine-3'-phosphorothioate
  modified_base 3: mod_base = OTHER; note = 2'-O-methyluridine-3'-phosphate
  modified_base 4: mod_base = OTHER; note = 2'-O-methyluridine-3'-phosphate
  modified_base 5: mod_base = OTHER; note = 2'-O-methyluridine-3'-phosphate
  modified_base 6: mod_base = OTHER; note = 2'-O-methyluridine-3'-phosphate
  modified_base 7: mod_base = OTHER; note = 2'-deoxy-2'-fluoroadenosine-3'-phosphate
  modified_base 8: mod_base = OTHER; note = 2'-O-methyladenosine-3'-phosphate
  modified_base 9: mod_base = OTHER; note = 2'-deoxy-2'-fluorouridine-3'-phosphate
  modified_base 10: mod_base = OTHER; note = 2'-deoxy-2'-fluorocytidine-3'-phosphate
  modified_base 11: mod_base = OTHER; note = 2'-deoxy-2'-fluorocytidine-3'-phosphate
  modified_base 12: mod_base = OTHER; note = 2'-O-methyluridine-3'-phosphate
  modified_base 13: mod_base = OTHER; note = 2'-O-methylcytidine-3'-phosphate
  modified_base 14: mod_base = OTHER; note = 2'-O-methyladenosine-3'-phosphate
  modified_base 15: mod_base = OTHER; note = 2'-O-methylcytidine-3'-phosphate
  modified_base 16: mod_base = OTHER; note = 2'-O-methyluridine-3'-phosphate
  modified_base 17: mod_base = OTHER; note = 2'-O-methylcytidine-3'-phosphate
  modified_base 18: mod_base = OTHER; note = 2'-O-methyluridine-3'-phosphate
  modified_base 19: mod_base = OTHER; note = 2'-O-methyladenosine-3'-phosphate
  modified_base 20: mod_base = OTHER; note = 2'-O-methyladenosine-3'-phosphorothioate
  modified_base 21: mod_base = OTHER; note = 2'-O-methyladenosine-3'-phosphorothioate  (1-(6-((5-( 4-(3-(3,5-dimethyl-1H-pyrazol-1-yl)-5-((S)-3-carboxy-1-((R) -3-(2-(5,6,7,8-tetrahydro-1,8-naphthyridin-2-yl)ethyl)pyrro lidin-1-yl)propan-2-yl)phenyl)piperazin-1-yl)-5-oxopentanoy l)amino)hexan-1-oyl)-4R-hydroxypyrrolidin-2S-yl)methyl ester
cattttaatcctcactctaaa

SEQ ID NO: 134 - RNA, 21 nt, synthetic construct
  source 1..21: mol_type = other RNA
  modified_base 1: mod_base = OTHER; note = 2'-O-methylcytidine-3'-phosphorothioate 5'-phosphorothioate 1-(6-((5-(4-(3-(3,5-dimethyl-1H-pyrazol-1-yl)-5-((S)-3-carb oxy-1-((R)-3-(2-(5,6,7,8-tetrahydro-1,8-naphthyridin-2-yl)e thyl)pyrrolidin-1-yl)propan-2-yl)phenyl)piperazin-1-yl)-5-o xopentanoyl)amino)hexan-1-oyl)-pyrrolidin-3S-yl ester
  modified_base 2: mod_base = OTHER; note = 2'-O-methyladenosine-3'-phosphate
  modified_base 3: mod_base = OTHER; note = 2'-O-methyluridine-3'-phosphate
  modified_base 4: mod_base = OTHER; note = 2'-O-methyluridine-3'-phosphate
  modified_base 5: mod_base = OTHER; note = 2'-O-methyluridine-3'-phosphate
  modified_base 6: mod_base = OTHER; note = 2'-O-methyluridine-3'-phosphate
  modified_base 7: mod_base = OTHER; note = 2'-deoxy-2'-fluoroadenosine-3'-phosphate
  modified_base 8: mod_base = OTHER; note = 2'-O-methyladenosine-3'-phosphate
  modified_base 9: mod_base = OTHER; note = 2'-deoxy-2'-fluorouridine-3'-phosphate
  modified_base 10: mod_base = OTHER; note = 2'-deoxy-2'-fluorocytidine-3'-phosphate
  modified_base 11: mod_base = OTHER; note = 2'-deoxy-2'-fluorocytidine-3'-phosphate
  modified_base 12: mod_base = OTHER; note = 2'-O-methyluridine-3'-phosphate
  modified_base 13: mod_base = OTHER; note = 2'-O-methylcytidine-3'-phosphate
  modified_base 14: mod_base = OTHER; note = 2'-O-methyladenosine-3'-phosphate
  modified_base 15: mod_base = OTHER; note = 2'-O-methylcytidine-3'-phosphate
  modified_base 16: mod_base = OTHER; note = 2'-O-methyluridine-3'-phosphate
  modified_base 17: mod_base = OTHER; note = 2'-O-methylcytidine-3'-phosphate
  modified_base 18: mod_base = OTHER; note = 2'-O-methyluridine-3'-phosphate
  modified_base 19: mod_base = OTHER; note = 2'-O-methyladenosine-3'-phosphate
  modified_base 20: mod_base = OTHER; note = 2'-O-methyladenosine-3'-phosphorothioate
  modified_base 21: mod_base = OTHER; note = 2'-O-methyladenosine-3'-phosphorothioate  (1-(6-((5-( 4-(3-(3,5-dimethyl-1H-pyrazol-1-yl)-5-((S)-3-carboxy-1-((R) -3-(2-(5,6,7,8-tetrahydro-1,8-naphthyridin-2-yl)ethyl)pyrro lidin-1-yl)propan-2-yl)phenyl)piperazin-1-yl)-5-oxopentanoy l)amino)hexan-1-oyl)-4R-hydroxypyrrolidin-2S-yl)methyl ester
cattttaatcctcactctaaa

SEQ ID NO: 135 - RNA, 21 nt, synthetic construct
  source 1..21: mol_type = other RNA
  modified_base 1: mod_base = OTHER; note = 2'-O-methylcytidine-3'-phosphorothioate 5'-phosphorothioate 1-(6-((5-(4-(3-(3,5-dimethyl-1H-pyrazol-1-yl)-5-((R)-3-carb oxy-1-((R)-3-(2-(5,6,7,8-tetrahydro-1,8-naphthyridin-2-yl)e thyl)pyrrolidin-1-yl)propan-2-yl)phenyl)piperazin-1-yl)-5-o xopentanoyl)amino)hexan-1-oyl)-pyrrolidin-3S-yl ester
  modified_base 2: mod_base = OTHER; note = 2'-O-methyladenosine-3'-phosphate
  modified_base 3: mod_base = OTHER; note = 2'-O-methyluridine-3'-phosphate
  modified_base 4: mod_base = OTHER; note = 2'-O-methyluridine-3'-phosphate
  modified_base 5: mod_base = OTHER; note = 2'-O-methyluridine-3'-phosphate
  modified_base 6: mod_base = OTHER; note = 2'-O-methyluridine-3'-phosphate
  modified_base 7: mod_base = OTHER; note = 2'-deoxy-2'-fluoroadenosine-3'-phosphate
  modified_base 8: mod_base = OTHER; note = 2'-O-methyladenosine-3'-phosphate
  modified_base 9: mod_base = OTHER; note = 2'-deoxy-2'-fluorouridine-3'-phosphate
  modified_base 10: mod_base = OTHER; note = 2'-deoxy-2'-fluorocytidine-3'-phosphate
  modified_base 11: mod_base = OTHER; note = 2'-deoxy-2'-fluorocytidine-3'-phosphate
  modified_base 12: mod_base = OTHER; note = 2'-O-methyluridine-3'-phosphate
  modified_base 13: mod_base = OTHER; note = 2'-O-methylcytidine-3'-phosphate
  modified_base 14: mod_base = OTHER; note = 2'-O-methyladenosine-3'-phosphate
  modified_base 15: mod_base = OTHER; note = 2'-O-methylcytidine-3'-phosphate
  modified_base 16: mod_base = OTHER; note = 2'-O-methyluridine-3'-phosphate
  modified_base 17: mod_base = OTHER; note = 2'-O-methylcytidine-3'-phosphate
  modified_base 18: mod_base = OTHER; note = 2'-O-methyluridine-3'-phosphate
  modified_base 19: mod_base = OTHER; note = 2'-O-methyladenosine-3'-phosphate
  modified_base 20: mod_base = OTHER; note = 2'-O-methyladenosine-3'-phosphorothioate
  modified_base 21: mod_base = OTHER; note = 2'-O-methyladenosine-3'-phosphorothioate (1-(6-((5-(4-(3-(3,5-dimethyl-1H-pyrazol-1-yl)-5-((R)-3-car boxy-1-((R)-3-(2-(5,6,7,8-tetrahydro-1,8-naphthyridin-2-yl) ethyl)pyrrolidin-1-yl)propan-2-yl)phenyl)piperazin-1-yl)-5- oxopentanoyl)amino)hexan-1-oyl)-4R-hydroxypyrrolidin-2S-yl) methyl ester
cattttaatcctcactctaaa

SEQ ID NO: 136 - RNA, 21 nt, synthetic construct
  source 1..21: mol_type = other RNA
  modified_base 1: mod_base = OTHER; note = 2'-O-methyluridine-3'-phosphorothioate
  modified_base 2: mod_base = OTHER; note = 2'-O-methyluridine-3'-phosphorothioate
  modified_base 3: mod_base = OTHER; note = 2'-O-methylguanosine-3'-phosphate
  modified_base 4: mod_base = OTHER; note = 2'-O-methylguanosine-3'-phosphate
  modified_base 5: mod_base = OTHER; note = 2'-O-methylguanosine-3'-phosphate
  modified_base 6: mod_base = OTHER; note = 2'-O-methylcytidine-3'-phosphate
  modified_base 7: mod_base = OTHER; note = 2'-deoxy-2'-fluoroadenosine-3'-phosphate
  modified_base 8: mod_base = OTHER; note = 2'-O-methyladenosine-3'-phosphate
  modified_base 9: mod_base = OTHER; note = 2'-deoxy-2'-fluoroadenosine-3'-phosphate
  modified_base 10: mod_base = OTHER; note = 2'-deoxy-2'-fluoroguanosine-3'-phosphate
  modified_base 11: mod_base = OTHER; note = 2'-deoxy-2'-fluoroguanosine-3'-phosphate
  modified_base 12: mod_base = OTHER; note = 2'-O-methyluridine-3'-phosphate
  modified_base 13: mod_base = OTHER; note = 2'-O-methylguanosine-3'-phosphate
  modified_base 14: mod_base = OTHER; note = 2'-O-methylguanosine-3'-phosphate
  modified_base 15: mod_base = OTHER; note = 2'-O-methyladenosine-3'-phosphate
  modified_base 16: mod_base = OTHER; note = 2'-O-methyladenosine-3'-phosphate
  modified_base 17: mod_base = OTHER; note = 2'-O-methyladenosine-3'-phosphate
  modified_base 18: mod_base = OTHER; note = 2'-O-methyluridine-3'-phosphate
  modified_base 19: mod_base = OTHER; note = 2'-O-methylguanosine-3'-phosphate
  modified_base 20: mod_base = OTHER; note = 2'-O-methyladenosine-3'-phosphorothioate
  modified_base 21: mod_base = OTHER; note = 2'-O-methyladenosine-3'-phosphorothioate ((2S,4R)-(1-(6-(((1R,8S,9S)-bicyclo[6.1.0]non-4-yn-9-ylmeth oxy)carbonylamino)hexan-1-oyl)-4-hydroxypyrrolidin-2-yl)met hyl) ester, click conjugate triazole formed between the cyclooctyne group and the azide group of (S)-3-(3-(4-(5-azidopentanoyl)piperazin-1-yl)-5-(3,5-dimeth yl-1H-pyrazol-1-yl)phenyl)-4-((R)-3-(((5,6,7,8-tetrahydro-1 ,8-naphthyridin-2-yl)oxy)methyl)pyrrolidin-1-yl)butanoic acid
ttgggcaaaggtggaaatgaa

SEQ ID NO: 137 - RNA, 21 nt, synthetic construct
  source 1..21: mol_type = other RNA
  modified_base 1: mod_base = OTHER; note = 2'-O-methyluridine-3'-phosphorothioate
  modified_base 2: mod_base = OTHER; note = 2'-O-methyluridine-3'-phosphorothioate
  modified_base 3: mod_base = OTHER; note = 2'-O-methylguanosine-3'-phosphate
  modified_base 4: mod_base = OTHER; note = 2'-O-methylguanosine-3'-phosphate
  modified_base 5: mod_base = OTHER; note = 2'-O-methylguanosine-3'-phosphate
  modified_base 6: mod_base = OTHER; note = 2'-O-methylcytidine-3'-phosphate
  modified_base 7: mod_base = OTHER; note = 2'-deoxy-2'-fluoroadenosine-3'-phosphate
  modified_base 8: mod_base = OTHER; note = 2'-O-methyladenosine-3'-phosphate
  modified_base 9: mod_base = OTHER; note = 2'-deoxy-2'-fluoroadenosine-3'-phosphate
  modified_base 10: mod_base = OTHER; note = 2'-deoxy-2'-fluoroguanosine-3'-phosphate
  modified_base 11: mod_base = OTHER; note = 2'-deoxy-2'-fluoroguanosine-3'-phosphate
  modified_base 12: mod_base = OTHER; note = 2'-O-methyluridine-3'-phosphate
  modified_base 13: mod_base = OTHER; note = 2'-O-methylguanosine-3'-phosphate
  modified_base 14: mod_base = OTHER; note = 2'-O-methylguanosine-3'-phosphate
  modified_base 15: mod_base = OTHER; note = 2'-O-methyladenosine-3'-phosphate
  modified_base 16: mod_base = OTHER; note = 2'-O-methyladenosine-3'-phosphate
  modified_base 17: mod_base = OTHER; note = 2'-O-methyladenosine-3'-phosphate
  modified_base 18: mod_base = OTHER; note = 2'-O-methyluridine-3'-phosphate
  modified_base 19: mod_base = OTHER; note = 2'-O-methylguanosine-3'-phosphate
  modified_base 20: mod_base = OTHER; note = 2'-O-methyladenosine-3'-phosphorothioate
  modified_base 21: mod_base = OTHER; note = 2'-O-methyladenosine-3'-phosphorothioate ((2S,4R)-(1-(6-(((1R,8S,9S)-bicyclo[6.1.0]non-4-yn-9-ylmeth oxy)carbonylamino)hexan-1-oyl)-4-hydroxypyrrolidin-2-yl)met hyl) ester, click conjugate triazole formed between the cyclooctyne group and the azide group of (S)-4-((R)-3-(2-(6-amino-5-methoxypyridin-2-yl)ethyl)pyrrol idin-1-yl)-3-(3-(4-(5-azidopentanoyl)piperazin-1-yl)-5-(3,5 -dimethyl-1H-pyrazol-1-yl)phenyl)butanoic acid
ttgggcaaaggtggaaatgaa

SEQ ID NO: 138 - RNA, 21 nt, synthetic construct
  source 1..21: mol_type = other RNA
  modified_base 1: mod_base = OTHER; note = 2'-O-methyluridine-3'-phosphorothioate
  modified_base 2: mod_base = OTHER; note = 2'-O-methyluridine-3'-phosphorothioate
  modified_base 3: mod_base = OTHER; note = 2'-O-methylguanosine-3'-phosphate
  modified_base 4: mod_base = OTHER; note = 2'-O-methylguanosine-3'-phosphate
  modified_base 5: mod_base = OTHER; note = 2'-O-methylguanosine-3'-phosphate
  modified_base 6: mod_base = OTHER; note = 2'-O-methylcytidine-3'-phosphate
  modified_base 7: mod_base = OTHER; note = 2'-deoxy-2'-fluoroadenosine-3'-phosphate
  modified_base 8: mod_base = OTHER; note = 2'-O-methyladenosine-3'-phosphate
  modified_base 9: mod_base = OTHER; note = 2'-deoxy-2'-fluoroadenosine-3'-phosphate
  modified_base 10: mod_base = OTHER; note = 2'-deoxy-2'-fluoroguanosine-3'-phosphate
  modified_base 11: mod_base = OTHER; note = 2'-deoxy-2'-fluoroguanosine-3'-phosphate
  modified_base 12: mod_base = OTHER; note = 2'-O-methyluridine-3'-phosphate
  modified_base 13: mod_base = OTHER; note = 2'-O-methylguanosine-3'-phosphate
  modified_base 14: mod_base = OTHER; note = 2'-O-methylguanosine-3'-phosphate
  modified_base 15: mod_base = OTHER; note = 2'-O-methyladenosine-3'-phosphate
  modified_base 16: mod_base = OTHER; note = 2'-O-methyladenosine-3'-phosphate
  modified_base 17: mod_base = OTHER; note = 2'-O-methyladenosine-3'-phosphate
  modified_base 18: mod_base = OTHER; note = 2'-O-methyluridine-3'-phosphate
  modified_base 19: mod_base = OTHER; note = 2'-O-methylguanosine-3'-phosphate
  modified_base 20: mod_base = OTHER; note = 2'-O-methyladenosine-3'-phosphorothioate
  modified_base 21: mod_base = OTHER; note = 2'-O-methyladenosine-3'-phosphorothioate ((2S,4R)-(1-(6-(((1R,8S,9S)-bicyclo[6.1.0]non-4-yn-9-ylmeth oxy)carbonylamino)hexan-1-oyl)-4-hydroxypyrrolidin-2-yl)met hyl) ester, click conjugate triazole formed between the cyclooctyne group and the azide group of (S)-3-(3-(4-(5-azidopentanoyl)piperazin-1-yl)-5-(3,5-dimeth yl-1H-pyrazol-1-yl)phenyl)-4-((R)-3-(2-(4-methoxy-5,6,7,8-t etrahydro-1,8-naphthyridin-2-yl)ethyl)pyrrolidin-1-yl)butan oic acid
ttgggcaaaggtggaaatgaa

SEQ ID NO: 139 - RNA, 21 nt, synthetic construct
  source 1..21: mol_type = other RNA
  modified_base 1: mod_base = OTHER; note = 2'-O-methyluridine-3'-phosphorothioate
  modified_base 2: mod_base = OTHER; note = 2'-O-methyluridine-3'-phosphorothioate
  modified_base 3: mod_base = OTHER; note = 2'-O-methylguanosine-3'-phosphate
  modified_base 4: mod_base = OTHER; note = 2'-O-methylguanosine-3'-phosphate
  modified_base 5: mod_base = OTHER; note = 2'-O-methylguanosine-3'-phosphate
  modified_base 6: mod_base = OTHER; note = 2'-O-methylcytidine-3'-phosphate
  modified_base 7: mod_base = OTHER; note = 2'-deoxy-2'-fluoroadenosine-3'-phosphate
  modified_base 8: mod_base = OTHER; note = 2'-O-methyladenosine-3'-phosphate
  modified_base 9: mod_base = OTHER; note = 2'-deoxy-2'-fluoroadenosine-3'-phosphate
  modified_base 10: mod_base = OTHER; note = 2'-deoxy-2'-fluoroguanosine-3'-phosphate
  modified_base 11: mod_base = OTHER; note = 2'-deoxy-2'-fluoroguanosine-3'-phosphate
  modified_base 12: mod_base = OTHER; note = 2'-O-methyluridine-3'-phosphate
  modified_base 13: mod_base = OTHER; note = 2'-O-methylguanosine-3'-phosphate
  modified_base 14: mod_base = OTHER; note = 2'-O-methylguanosine-3'-phosphate
  modified_base 15: mod_base = OTHER; note = 2'-O-methyladenosine-3'-phosphate
  modified_base 16: mod_base = OTHER; note = 2'-O-methyladenosine-3'-phosphate
  modified_base 17: mod_base = OTHER; note = 2'-O-methyladenosine-3'-phosphate
  modified_base 18: mod_base = OTHER; note = 2'-O-methyluridine-3'-phosphate
  modified_base 19: mod_base = OTHER; note = 2'-O-methylguanosine-3'-phosphate
  modified_base 20: mod_base = OTHER; note = 2'-O-methyladenosine-3'-phosphorothioate
  modified_base 21: mod_base = OTHER; note = 2'-O-methyladenosine-3'-phosphorothioate ((2S,4R)-1-[23-((5-(4-(3-((S)-1-carboxy-3-((R)-3-(2-(5,6,7, 8-tetrahydro-1,8-naphthyridin-2-yl)ethyl)pyrrolidin-1-yl)pr opan-2-yl)-5-(3,5-dimethyl-1H-pyrazol-1-yl)phenyl)piperazin -1-yl)-5-oxopentan-1-oyl)amino)-14,14-bis[3-(3-((5-(4-(3-(( S)-1-carboxy-3-((R)-3-(2-(5,6,7,8-tetrahydro-1,8-naphthyrid in-2-yl)ethyl)pyrrolidin-1-yl)propan-2-yl)-5-(3,5-dimethyl- 1H-pyrazol-1-yl)phenyl)piperazin-1-yl)-5-oxopentan-1-oyl)am ino)propylamino)-3-oxo-propoxymethyl]-1,12,19-trioxo-16-oxa -13,20-diazatricos-1-yl]-4-hydroxypyrrolidin-2-yl)methyl ester
ttgggcaaaggtggaaatgaa

SEQ ID NO: 140 - RNA, 23 nt, synthetic construct
  source 1..23: mol_type = other RNA
  modified_base 1: mod_base = OTHER; note = 2'-O-methyluridine-3'-phosphorothioate 5'-(E)-Vinylphosphonate
  modified_base 2: mod_base = OTHER; note = 2'-deoxy-2'-fluorouridine-3'-phosphorothioate
  modified_base 3: mod_base = OTHER; note = 2'-O-methyluridine-3'-phosphate
  modified_base 4: mod_base = OTHER; note = 2'-O-methyladenosine-3'-phosphate
  modified_base 5: mod_base = OTHER; note = 2'-O-methylguanosine-3'-phosphate
  modified_base 6: mod_base = OTHER; note = 2'-deoxy-2'-fluoroadenosine-3'-phosphate
  modified_base 7: mod_base = OTHER; note = 2'-O-methylguanosine-3'-phosphate
  modified_base 8: mod_base = OTHER; note = 2'-deoxy-2'-fluorouridine-3'-phosphate
  modified_base 9: mod_base = OTHER; note = 2'-deoxy-2'-fluoroguanosine-3'-phosphate
  modified_base 10: mod_base = OTHER; note = 2'-O-methyladenosine-3'-phosphate
  modified_base 11: mod_base = OTHER; note = 2'-O-methylguanosine-3'-phosphate
  modified_base 12: mod_base = OTHER; note = 2'-O-methylguanosine-3'-phosphate
  modified_base 13: mod_base = OTHER; note = 2'-O-methyladenosine-3'-phosphate
  modified_base 14: mod_base = OTHER; note = 2'-deoxy-2'-fluorouridine-3'-phosphate
  modified_base 15: mod_base = OTHER; note = 2'-O-methyluridine-3'-phosphate
  modified_base 16: mod_base = OTHER; note = 2'-deoxy-2'-fluoroadenosine-3'-phosphate
  modified_base 17: mod_base = OTHER; note = 2'-O-methyladenosine-3'-phosphate
  modified_base 18: mod_base = OTHER; note = 2'-O-methyladenosine-3'-phosphate
  modified_base 19: mod_base = OTHER; note = 2'-O-methyladenosine-3'-phosphate
  modified_base 20: mod_base = OTHER; note = 2'-O-methyluridine-3'-phosphate
  modified_base 21: mod_base = OTHER; note = 2'-O-methylguanosine-3'-phosphorothioate
  modified_base 22: mod_base = OTHER; note = 2'-O-methyladenosine-3'-phosphorothioate
  modified_base 23: mod_base = OTHER; note = 2'-O-methylguanosine
tttagagtgaggattaaaatgag

SEQ ID NO: 141 - RNA, 23 nt, synthetic construct
  source 1..23: mol_type = other RNA
  modified_base 1: mod_base = OTHER; note = 2'-O-methyluridine-3'-phosphorothioate 5'-(E)-Vinylphosphonate
  modified_base 2: mod_base = OTHER; note = 2'-deoxy-2'-fluorouridine-3'-phosphorothioate
  modified_base 3: mod_base = OTHER; note = 2'-O-methylcytidine-3'-phosphate
  modified_base 4: mod_base = OTHER; note = 2'-O-methyladenosine-3'-phosphate
  modified_base 5: mod_base = OTHER; note = 2'-O-methyluridine-3'-phosphate
  modified_base 6: mod_base = OTHER; note = 2'-deoxy-2'-fluorouridine-3'-phosphate
  modified_base 7: mod_base = OTHER; note = 2'-O-methyluridine-3'-phosphate
  modified_base 8: mod_base = OTHER; note = 2'-deoxy-2'-fluorocytidine-3'-phosphate
  modified_base 9: mod_base = OTHER; note = 2'-deoxy-2'-fluorocytidine-3'-phosphate
  modified_base 10: mod_base = OTHER; note = 2'-O-methyladenosine-3'-phosphate
  modified_base 11: mod_base = OTHER; note = 2'-O-methylcytidine-3'-phosphate
  modified_base 12: mod_base = OTHER; note = 2'-O-methylcytidine-3'-phosphate
  modified_base 13: mod_base = OTHER; note = 2'-O-methyluridine-3'-phosphate
  modified_base 14: mod_base = OTHER; note = 2'-deoxy-2'-fluorouridine-3'-phosphate
  modified_base 15: mod_base = OTHER; note = 2'-O-methyluridine-3'-phosphate
  modified_base 16: mod_base = OTHER; note = 2'-deoxy-2'-fluoroguanosine-3'-phosphate
  modified_base 17: mod_base = OTHER; note = 2'-O-methylcytidine-3'-phosphate
  modified_base 18: mod_base = OTHER; note = 2'-O-methylcytidine-3'-phosphate
  modified_base 19: mod_base = OTHER; note = 2'-O-methylcytidine-3'-phosphate
  modified_base 20: mod_base = OTHER; note = 2'-O-methyladenosine-3'-phosphate
  modified_base 21: mod_base = OTHER; note = 2'-O-methyladenosine-3'-phosphorothioate
  modified_base 22: mod_base = OTHER; note = 2'-O-methylguanosine-3'-phosphorothioate
  modified_base 23: mod_base = OTHER; note = 2'-O-methyluridine
ttcatttccacctttgcccaagt

SEQ ID NO: 142 - RNA, 21 nt, synthetic construct
  source 1..21: mol_type = other RNA
  modified_base 1: mod_base = OTHER; note = 2'-O-methylcytidine-3'-phosphorothioate
  modified_base 2: mod_base = OTHER; note = 2'-O-methyladenosine-3'-phosphorothioate
  modified_base 3: mod_base = OTHER; note = 2'-O-methyluridine-3'-phosphate
  modified_base 4: mod_base = OTHER; note = 2'-O-methyluridine-3'-phosphate
  modified_base 5: mod_base = OTHER; note = 2'-O-methyluridine-3'-phosphate
  modified_base 6: mod_base = OTHER; note = 2'-O-docosanyl-uridine-3'-phosphate
  modified_base 7: mod_base = OTHER; note = 2'-deoxy-2'-fluoroadenosine-3'-phosphate
  modified_base 8: mod_base = OTHER; note = 2'-O-methyladenosine-3'-phosphate
  modified_base 9: mod_base = OTHER; note = 2'-deoxy-2'-fluorouridine-3'-phosphate
  modified_base 10: mod_base = OTHER; note = 2'-deoxy-2'-fluorocytidine-3'-phosphate
  modified_base 11: mod_base = OTHER; note = 2'-deoxy-2'-fluorocytidine-3'-phosphate
  modified_base 12: mod_base = OTHER; note = 2'-O-methyluridine-3'-phosphate
  modified_base 13: mod_base = OTHER; note = 2'-O-methylcytidine-3'-phosphate
  modified_base 14: mod_base = OTHER; note = 2'-O-methyladenosine-3'-phosphate
  modified_base 15: mod_base = OTHER; note = 2'-O-methylcytidine-3'-phosphate
  modified_base 16: mod_base = OTHER; note = 2'-O-methyluridine-3'-phosphate
  modified_base 17: mod_base = OTHER; note = 2'-O-methylcytidine-3'-phosphate
  modified_base 18: mod_base = OTHER; note = 2'-O-methyluridine-3'-phosphate
  modified_base 19: mod_base = OTHER; note = 2'-O-methyladenosine-3'-phosphorothioate
  modified_base 20: mod_base = OTHER; note = 2'-O-methyladenosine-3'-phosphorothioate
  modified_base 21: mod_base = OTHER; note = 2'-O-methyladenosine
cattttaatcctcactctaaa

SEQ ID NO: 143 - RNA, 21 nt, synthetic construct
  source 1..21: mol_type = other RNA
cattttaatcctcactctaaa

SEQ ID NO: 144 - RNA, 23 nt, synthetic construct
  source 1..23: mol_type = other RNA
tttagagtgaggattaaaatgag

SEQ ID NO: 145 - RNA, 21 nt, synthetic construct
  source 1..21: mol_type = other RNA
  modified_base 1: mod_base = OTHER; note = 2'-O-methylcytidine-3'-phosphorothioate
  modified_base 2: mod_base = OTHER; note = 2'-O-methyladenosine-3'-phosphorothioate
  modified_base 3: mod_base = OTHER; note = 2'-O-methyluridine-3'-phosphate
  modified_base 4: mod_base = OTHER; note = 2'-O-methyluridine-3'-phosphate
  modified_base 5: mod_base = OTHER; note = 2'-O-methyluridine-3'-phosphate
  modified_base 6: mod_base = OTHER; note = 2'-O-methyluridine-3'-phosphate
  modified_base 7: mod_base = OTHER; note = 2'-deoxy-2'-fluoroadenosine-3'-phosphate
  modified_base 8: mod_base = OTHER; note = 2'-O-methyladenosine-3'-phosphate
  modified_base 9: mod_base = OTHER; note = 2'-deoxy-2'-fluorouridine-3'-phosphate
  modified_base 10: mod_base = OTHER; note = 2'-deoxy-2'-fluorocytidine-3'-phosphate
  modified_base 11: mod_base = OTHER; note = 2'-deoxy-2'-fluorocytidine-3'-phosphate
  modified_base 12: mod_base = OTHER; note = 2'-O-methyluridine-3'-phosphate
  modified_base 13: mod_base = OTHER; note = 2'-O-methylcytidine-3'-phosphate
  modified_base 14: mod_base = OTHER; note = 2'-O-methyladenosine-3'-phosphate
  modified_base 15: mod_base = OTHER; note = 2'-O-methylcytidine-3'-phosphate
  modified_base 16: mod_base = OTHER; note = 2'-O-methyluridine-3'-phosphate
  modified_base 17: mod_base = OTHER; note = 2'-O-methylcytidine-3'-phosphate
  modified_base 18: mod_base = OTHER; note = 2'-O-methyluridine-3'-phosphate
  modified_base 19: mod_base = OTHER; note = 2'-O-methyladenosine-3'-phosphate
  modified_base 20: mod_base = OTHER; note = 2'-O-methyladenosine-3'-phosphorothioate
  modified_base 21: mod_base = OTHER; note = 2'-O-methyladenosine-3'-phosphorothioate ((2S,4R)-1-[23-((5-(4-(3-((S)-1-carboxy-3-((R)-3-(2-(5,6,7, 8-tetrahydro-1,8-naphthyridin-2-yl)ethyl)pyrrolidin-1-yl)pr opan-2-yl)-5-(3,5-dimethyl-1H-pyrazol-1-yl)phenyl)piperazin -1-yl)-5-oxopentan-1-oyl)amino)-14,14-bis[3-(3-((5-(4-(3-(( S)-1-carboxy-3-((R)-3-(2-(5,6,7,8-tetrahydro-1,8-naphthyrid in-2-yl)ethyl)pyrrolidin-1-yl)propan-2-yl)-5-(3,5-dimethyl- 1H-pyrazol-1-yl)phenyl)piperazin-1-yl)-5-oxopentan-1-oyl)am ino)propylamino)-3-oxo-propoxymethyl]-1,12,19-trioxo-16-oxa -13,20-diazatricos-1-yl]-4-hydroxypyrrolidin-2-yl)methyl ester
cattttaatcctcactctaaa

SEQ ID NO: 146 - RNA, 21 nt, synthetic construct
  source 1..21: mol_type = other RNA
  modified_base 1: mod_base = OTHER; note = 2'-O-methylcytidine-3'-phosphorothioate
  modified_base 2: mod_base = OTHER; note = 2'-O-methyladenosine-3'-phosphorothioate
  modified_base 3: mod_base = OTHER; note = 2'-O-methyluridine-3'-phosphate
  modified_base 4: mod_base = OTHER; note = 2'-O-methyluridine-3'-phosphate
  modified_base 5: mod_base = OTHER; note = 2'-O-methyluridine-3'-phosphate
  modified_base 6: mod_base = OTHER; note = 2'-O-methyluridine-3'-phosphate
  modified_base 7: mod_base = OTHER; note = 2'-deoxy-2'-fluoroadenosine-3'-phosphate
  modified_base 8: mod_base = OTHER; note = 2'-O-methyladenosine-3'-phosphate
  modified_base 9: mod_base = OTHER; note = 2'-deoxy-2'-fluorouridine-3'-phosphate
  modified_base 10: mod_base = OTHER; note = 2'-deoxy-2'-fluorocytidine-3'-phosphate
  modified_base 11: mod_base = OTHER; note = 2'-deoxy-2'-fluorocytidine-3'-phosphate
  modified_base 12: mod_base = OTHER; note = 2'-O-methyluridine-3'-phosphate
  modified_base 13: mod_base = OTHER; note = 2'-O-methylcytidine-3'-phosphate
  modified_base 14: mod_base = OTHER; note = 2'-O-methyladenosine-3'-phosphate
  modified_base 15: mod_base = OTHER; note = 2'-O-methylcytidine-3'-phosphate
  modified_base 16: mod_base = OTHER; note = 2'-O-methyluridine-3'-phosphate
  modified_base 17: mod_base = OTHER; note = 2'-O-methylcytidine-3'-phosphate
  modified_base 18: mod_base = OTHER; note = 2'-O-methyluridine-3'-phosphate
  modified_base 19: mod_base = OTHER; note = 2'-O-methyladenosine-3'-phosphate
  modified_base 20: mod_base = OTHER; note = 2'-O-methyladenosine-3'-phosphorothioate
  modified_base 21: mod_base = OTHER; note = 2'-O-methyladenosine-3'-phosphorothioate ((2S,4R)-1-[23-((5-(4-(3-((R)-1-carboxy-3-((R)-3-(2-(5,6,7, 8-tetrahydro-1,8-naphthyridin-2-yl)ethyl)pyrrolidin-1-yl)pr opan-2-yl)-5-(3,5-dimethyl-1H-pyrazol-1-yl)phenyl)piperazin -1-yl)-5-oxopentan-1-oyl)amino)-14,14-bis[3-(3-((5-(4-(3-(( R)-1-carboxy-3-((R)-3-(2-(5,6,7,8-tetrahydro-1,8-naphthyrid in-2-yl)ethyl)pyrrolidin-1-yl)propan-2-yl)-5-(3,5-dimethyl- 1H-pyrazol-1-yl)phenyl)piperazin-1-yl)-5-oxopentan-1-oyl)am ino)propylamino)-3-oxo-propoxymethyl]-1,12,19-trioxo-16-oxa -13,20-diazatricos-1-yl]-4-hydroxypyrrolidin-2-yl)methyl ester
cattttaatcctcactctaaa

SEQ ID NO: 147 - RNA, 21 nt, synthetic construct
  source 1..21: mol_type = other RNA
  modified_base 1: mod_base = OTHER; note = 2'-O-methylcytidine-3'-phosphorothioate 5'-phosphorothioate 1-(6-((5-(4-(3-(3,5-dimethyl-1H-pyrazol-1-yl)-5-((S)-3-carb oxy-1-((R)-3-(2-(5,6,7,8-tetrahydro-1,8-naphthyridin-2-yl)e thyl)pyrrolidin-1-yl)propan-2-yl)phenyl)piperazin-1-yl)-5-o xopentanoyl)amino)hexan-1-oyl)-pyrrolidin-3S-yl ester
  modified_base 2: mod_base = OTHER; note = 2'-O-methyladenosine-3'-phosphate
  modified_base 3: mod_base = OTHER; note = 2'-O-methyluridine-3'-phosphate
  modified_base 4: mod_base = OTHER; note = 2'-O-methyluridine-3'-phosphate
  modified_base 5: mod_base = OTHER; note = 2'-O-methyluridine-3'-phosphate
  modified_base 6: mod_base = OTHER; note = 2'-O-methyluridine-3'-phosphate
  modified_base 7: mod_base = OTHER; note = 2'-deoxy-2'-fluoroadenosine-3'-phosphate
  modified_base 8: mod_base = OTHER; note = 2'-O-methyladenosine-3'-phosphate
  modified_base 9: mod_base = OTHER; note = 2'-deoxy-2'-fluorouridine-3'-phosphate
  modified_base 10: mod_base = OTHER; note = 2'-deoxy-2'-fluorocytidine-3'-phosphate
  modified_base 11: mod_base = OTHER; note = 2'-deoxy-2'-fluorocytidine-3'-phosphate
  modified_base 12: mod_base = OTHER; note = 2'-O-methyluridine-3'-phosphate
  modified_base 13: mod_base = OTHER; note = 2'-O-methylcytidine-3'-phosphate
  modified_base 14: mod_base = OTHER; note = 2'-O-methyladenosine-3'-phosphate
  modified_base 15: mod_base = OTHER; note = 2'-O-methylcytidine-3'-phosphate
  modified_base 16: mod_base = OTHER; note = 2'-O-methyluridine-3'-phosphate
  modified_base 17: mod_base = OTHER; note = 2'-O-methylcytidine-3'-phosphate
  modified_base 18: mod_base = OTHER; note = 2'-O-methyluridine-3'-phosphate
  modified_base 19: mod_base = OTHER; note = 2'-O-methyladenosine-3'-phosphate
  modified_base 20: mod_base = OTHER; note = 2'-O-methyladenosine-3'-phosphorothioate
  modified_base 21: mod_base = OTHER; note = 2'-O-methyladenosine-3'-phosphorothioate  (1-(6-((5-( 4-(3-(3,5-dimethyl-1H-pyrazol-1-yl)-5-((S)-3-carboxy-1-((R) -3-(2-(5,6,7,8-tetrahydro-1,8-naphthyridin-2-yl)ethyl)pyrro lidin-1-yl)propan-2-yl)phenyl)piperazin-1-yl)-5-oxopentanoy l)amino)hexan-1-oyl)-4R-hydroxypyrrolidin-2S-yl)methyl ester
cattttaatcctcactctaaa

SEQ ID NO: 148 - RNA, 21 nt, synthetic construct
  source 1..21: mol_type = other RNA
  modified_base 1: mod_base = OTHER; note = 2'-O-methylcytidine-3'-phosphorothioate 5'-phosphorothioate 1-(6-((5-(4-(3-(3,5-dimethyl-1H-pyrazol-1-yl)-5-((R)-3-carb oxy-1-((R)-3-(2-(5,6,7,8-tetrahydro-1,8-naphthyridin-2-yl)e thyl)pyrrolidin-1-yl)propan-2-yl)phenyl)piperazin-1-yl)-5-o xopentanoyl)amino)hexan-1-oyl)-pyrrolidin-3S-yl ester
  modified_base 2: mod_base = OTHER; note = 2'-O-methyladenosine-3'-phosphate
  modified_base 3: mod_base = OTHER; note = 2'-O-methyluridine-3'-phosphate
  modified_base 4: mod_base = OTHER; note = 2'-O-methyluridine-3'-phosphate
  modified_base 5: mod_base = OTHER; note = 2'-O-methyluridine-3'-phosphate
  modified_base 6: mod_base = OTHER; note = 2'-O-methyluridine-3'-phosphate
  modified_base 7: mod_base = OTHER; note = 2'-deoxy-2'-fluoroadenosine-3'-phosphate
  modified_base 8: mod_base = OTHER; note = 2'-O-methyladenosine-3'-phosphate
  modified_base 9: mod_base = OTHER; note = 2'-deoxy-2'-fluorouridine-3'-phosphate
  modified_base 10: mod_base = OTHER; note = 2'-deoxy-2'-fluorocytidine-3'-phosphate
  modified_base 11: mod_base = OTHER; note = 2'-deoxy-2'-fluorocytidine-3'-phosphate
  modified_base 12: mod_base = OTHER; note = 2'-O-methyluridine-3'-phosphate
  modified_base 13: mod_base = OTHER; note = 2'-O-methylcytidine-3'-phosphate
  modified_base 14: mod_base = OTHER; note = 2'-O-methyladenosine-3'-phosphate
  modified_base 15: mod_base = OTHER; note = 2'-O-methylcytidine-3'-phosphate
  modified_base 16: mod_base = OTHER; note = 2'-O-methyluridine-3'-phosphate
  modified_base 17: mod_base = OTHER; note = 2'-O-methylcytidine-3'-phosphate
  modified_base 18: mod_base = OTHER; note = 2'-O-methyluridine-3'-phosphate
  modified_base 19: mod_base = OTHER; note = 2'-O-methyladenosine-3'-phosphate
  modified_base 20: mod_base = OTHER; note = 2'-O-methyladenosine-3'-phosphorothioate
  modified_base 21: mod_base = OTHER; note = 2'-O-methyladenosine-3'-phosphorothioate (1-(6-((5-(4-(3-(3,5-dimethyl-1H-pyrazol-1-yl)-5-((R)-3-car boxy-1-((R)-3-(2-(5,6,7,8-tetrahydro-1,8-naphthyridin-2-yl) ethyl)pyrrolidin-1-yl)propan-2-yl)phenyl)piperazin-1-yl)-5- oxopentanoyl)amino)hexan-1-oyl)-4R-hydroxypyrrolidin-2S-yl) methyl ester
cattttaatcctcactctaaa

SEQ ID NO: 149 - RNA, 21 nt, synthetic construct
  source 1..21: mol_type = other RNA
  modified_base 1: mod_base = OTHER; note = 2'-O-methylcytidine-3'-phosphorothioate
  modified_base 2: mod_base = OTHER; note = 2'-O-methyladenosine-3'-phosphorothioate
  modified_base 3: mod_base = OTHER; note = 2'-O-methyluridine-3'-phosphate
  modified_base 4: mod_base = OTHER; note = 2'-O-methyluridine-3'-phosphate
  modified_base 5: mod_base = OTHER; note = 2'-O-methyluridine-3'-phosphate
  modified_base 6: mod_base = OTHER; note = 2'-O-methyluridine-3'-phosphate
  modified_base 7: mod_base = OTHER; note = 2'-deoxy-2'-fluoroadenosine-3'-phosphate
  modified_base 8: mod_base = OTHER; note = 2'-O-methyladenosine-3'-phosphate
  modified_base 9: mod_base = OTHER; note = 2'-deoxy-2'-fluorouridine-3'-phosphate
  modified_base 10: mod_base = OTHER; note = 2'-deoxy-2'-fluorocytidine-3'-phosphate
  modified_base 11: mod_base = OTHER; note = 2'-deoxy-2'-fluorocytidine-3'-phosphate
  modified_base 12: mod_base = OTHER; note = 2'-O-methyluridine-3'-phosphate
  modified_base 13: mod_base = OTHER; note = 2'-O-methylcytidine-3'-phosphate
  modified_base 14: mod_base = OTHER; note = 2'-O-methyladenosine-3'-phosphate
  modified_base 15: mod_base = OTHER; note = 2'-O-methylcytidine-3'-phosphate
  modified_base 16: mod_base = OTHER; note = 2'-O-methyluridine-3'-phosphate
  modified_base 17: mod_base = OTHER; note = 2'-O-methylcytidine-3'-phosphate
  modified_base 18: mod_base = OTHER; note = 2'-O-methyluridine-3'-phosphate
  modified_base 19: mod_base = OTHER; note = 2'-O-methyladenosine-3'-phosphate
  modified_base 20: mod_base = OTHER; note = 2'-O-methyladenosine-3'-phosphorothioate
  modified_base 21: mod_base = OTHER; note = 2'-O-methyladenosine-3'-phosphorothioate  (1-(6-((5-( 4-(3-(3,5-dimethyl-1H-pyrazol-1-yl)-5-((S)-3-carboxy-1-((R) -3-(2-(5,6,7,8-tetrahydro-1,8-naphthyridin-2-yl)ethyl)pyrro lidin-1-yl)propan-2-yl)phenyl)piperazin-1-yl)-5-oxopentanoy l)amino)hexan-1-oyl)-4R-hydroxypyrrolidin-2S-yl)methyl ester
cattttaatcctcactctaaa

SEQ ID NO: 150 - RNA, 21 nt, synthetic construct
  source 1..21: mol_type = other RNA
  modified_base 1: mod_base = OTHER; note = 2'-O-methylcytidine-3'-phosphorothioate
  modified_base 2: mod_base = OTHER; note = 2'-O-methyladenosine-3'-phosphorothioate
  modified_base 3: mod_base = OTHER; note = 2'-O-methyluridine-3'-phosphate
  modified_base 4: mod_base = OTHER; note = 2'-O-methyluridine-3'-phosphate
  modified_base 5: mod_base = OTHER; note = 2'-O-methyluridine-3'-phosphate
  modified_base 6: mod_base = OTHER; note = 2'-O-methyluridine-3'-phosphate
  modified_base 7: mod_base = OTHER; note = 2'-deoxy-2'-fluoroadenosine-3'-phosphate
  modified_base 8: mod_base = OTHER; note = 2'-O-methyladenosine-3'-phosphate
  modified_base 9: mod_base = OTHER; note = 2'-deoxy-2'-fluorouridine-3'-phosphate
  modified_base 10: mod_base = OTHER; note = 2'-deoxy-2'-fluorocytidine-3'-phosphate
  modified_base 11: mod_base = OTHER; note = 2'-deoxy-2'-fluorocytidine-3'-phosphate
  modified_base 12: mod_base = OTHER; note = 2'-O-methyluridine-3'-phosphate
  modified_base 13: mod_base = OTHER; note = 2'-O-methylcytidine-3'-phosphate
  modified_base 14: mod_base = OTHER; note = 2'-O-methyladenosine-3'-phosphate
  modified_base 15: mod_base = OTHER; note = 2'-O-methylcytidine-3'-phosphate
  modified_base 16: mod_base = OTHER; note = 2'-O-methyluridine-3'-phosphate
  modified_base 17: mod_base = OTHER; note = 2'-O-methylcytidine-3'-phosphate
  modified_base 18: mod_base = OTHER; note = 2'-O-methyluridine-3'-phosphate
  modified_base 19: mod_base = OTHER; note = 2'-O-methyladenosine-3'-phosphate
  modified_base 20: mod_base = OTHER; note = 2'-O-methyladenosine-3'-phosphorothioate
  modified_base 21: mod_base = OTHER; note = 2'-O-methyladenosine-3'-phosphorothioate (1-(6-((5-(4-(3-(3,5-dimethyl-1H-pyrazol-1-yl)-5-((R)-3-car boxy-1-((R)-3-(2-(5,6,7,8-tetrahydro-1,8-naphthyridin-2-yl) ethyl)pyrrolidin-1-yl)propan-2-yl)phenyl)piperazin-1-yl)-5- oxopentanoyl)amino)hexan-1-oyl)-4R-hydroxypyrrolidin-2S-yl) methyl ester
cattttaatcctcactctaaa

SEQ ID NO: 151 - RNA, 21 nt, synthetic construct
  source 1..21: mol_type = other RNA
  modified_base 1: mod_base = OTHER; note = 2'-O-methylcytidine-3'-phosphorothioate
  modified_base 2: mod_base = OTHER; note = 2'-O-methyladenosine-3'-phosphorothioate
  modified_base 3: mod_base = OTHER; note = 2'-O-methyluridine-3'-phosphate
  modified_base 4: mod_base = OTHER; note = 2'-O-methyluridine-3'-phosphate
  modified_base 5: mod_base = OTHER; note = 2'-O-methyluridine-3'-phosphate
  modified_base 6: mod_base = OTHER; note = 2'-O-hexadecyl-uridine-3'-phosphate
  modified_base 7: mod_base = OTHER; note = 2'-deoxy-2'-fluoroadenosine-3'-phosphate
  modified_base 8: mod_base = OTHER; note = 2'-O-methyladenosine-3'-phosphate
  modified_base 9: mod_base = OTHER; note = 2'-deoxy-2'-fluorouridine-3'-phosphate
  modified_base 10: mod_base = OTHER; note = 2'-deoxy-2'-fluorocytidine-3'-phosphate
  modified_base 11: mod_base = OTHER; note = 2'-deoxy-2'-fluorocytidine-3'-phosphate
  modified_base 12: mod_base = OTHER; note = 2'-O-methyluridine-3'-phosphate
  modified_base 13: mod_base = OTHER; note = 2'-O-methylcytidine-3'-phosphate
  modified_base 14: mod_base = OTHER; note = 2'-O-methyladenosine-3'-phosphate
  modified_base 15: mod_base = OTHER; note = 2'-O-methylcytidine-3'-phosphate
  modified_base 16: mod_base = OTHER; note = 2'-O-methyluridine-3'-phosphate
  modified_base 17: mod_base = OTHER; note = 2'-O-methylcytidine-3'-phosphate
  modified_base 18: mod_base = OTHER; note = 2'-O-methyluridine-3'-phosphate
  modified_base 19: mod_base = OTHER; note = 2'-O-methyladenosine-3'-phosphorothioate
  modified_base 20: mod_base = OTHER; note = 2'-O-methyladenosine-3'-phosphorothioate
  modified_base 21: mod_base = OTHER; note = 2'-O-methyladenosine
cattttaatcctcactctaaa

SEQ ID NO: 152 - RNA, 21 nt, synthetic construct
  source 1..21: mol_type = other RNA
  modified_base 1: mod_base = OTHER; note = 2'-O-methylcytidine-3'-phosphorothioate
  modified_base 2: mod_base = OTHER; note = 2'-O-methyladenosine-3'-phosphorothioate
  modified_base 3: mod_base = OTHER; note = 2'-O-methyluridine-3'-phosphate
  modified_base 4: mod_base = OTHER; note = 2'-O-methyluridine-3'-phosphate
  modified_base 5: mod_base = OTHER; note = 2'-O-methyluridine-3'-phosphate
  modified_base 6: mod_base = OTHER; note = 2'-O-methyluridine-3'-phosphate
  modified_base 7: mod_base = OTHER; note = 2'-deoxy-2'-fluoroadenosine-3'-phosphate
  modified_base 8: mod_base = OTHER; note = 2'-O-methyladenosine-3'-phosphate
  modified_base 9: mod_base = OTHER; note = 2'-deoxy-2'-fluorouridine-3'-phosphate
  modified_base 10: mod_base = OTHER; note = 2'-deoxy-2'-fluorocytidine-3'-phosphate
  modified_base 11: mod_base = OTHER; note = 2'-deoxy-2'-fluorocytidine-3'-phosphate
  modified_base 12: mod_base = OTHER; note = 2'-O-methyluridine-3'-phosphate
  modified_base 13: mod_base = OTHER; note = 2'-O-methylcytidine-3'-phosphate
  modified_base 14: mod_base = OTHER; note = 2'-O-methyladenosine-3'-phosphate
  modified_base 15: mod_base = OTHER; note = 2'-O-methylcytidine-3'-phosphate
  modified_base 16: mod_base = OTHER; note = 2'-O-methyluridine-3'-phosphate
  modified_base 17: mod_base = OTHER; note = 2'-O-methylcytidine-3'-phosphate
  modified_base 18: mod_base = OTHER; note = 2'-O-methyluridine-3'-phosphate
  modified_base 19: mod_base = OTHER; note = 2'-O-methyladenosine-3'-phosphorothioate
  modified_base 20: mod_base = OTHER; note = 2'-O-methyladenosine-3'-phosphorothioate
  modified_base 21: mod_base = OTHER; note = 2'-O-methyladenosine
cattttaatcctcactctaaa

SEQ ID NO: 153 - RNA, 23 nt, synthetic construct
  source 1..23: mol_type = other RNA
  modified_base 1: mod_base = OTHER; note = 2'-O-methyluridine-3'-phosphorothioate 5'-(E)-Vinylphosphonate
  modified_base 2: mod_base = OTHER; note = 2'-deoxy-2'-fluorouridine-3'-phosphorothioate
  modified_base 3: mod_base = OTHER; note = 2'-O-methyluridine-3'-phosphate
  modified_base 4: mod_base = OTHER; note = 2'-O-methyladenosine-3'-phosphate
  modified_base 5: mod_base = OTHER; note = 2'-O-methylguanosine-3'-phosphate
  modified_base 6: mod_base = OTHER; note = 2'-deoxy-2'-fluoroadenosine-3'-phosphate
  modified_base 7: mod_base = OTHER; note = 2'-O-methylguanosine-3'-phosphate
  modified_base 8: mod_base = OTHER; note = 2'-deoxy-2'-fluorouridine-3'-phosphate
  modified_base 9: mod_base = OTHER; note = 2'-deoxy-2'-fluoroguanosine-3'-phosphate
  modified_base 10: mod_base = OTHER; note = 2'-O-methyladenosine-3'-phosphate
  modified_base 11: mod_base = OTHER; note = 2'-O-methylguanosine-3'-phosphate
  modified_base 12: mod_base = OTHER; note = 2'-O-methylguanosine-3'-phosphate
  modified_base 13: mod_base = OTHER; note = 2'-O-methyladenosine-3'-phosphate
  modified_base 14: mod_base = OTHER; note = 2'-deoxy-2'-fluorouridine-3'-phosphate
  modified_base 15: mod_base = OTHER; note = 2'-O-methyluridine-3'-phosphate
  modified_base 16: mod_base = OTHER; note = 2'-deoxy-2'-fluoroadenosine-3'-phosphate
  modified_base 17: mod_base = OTHER; note = 2'-O-methyladenosine-3'-phosphate
  modified_base 18: mod_base = OTHER; note = 2'-O-methyladenosine-3'-phosphate
  modified_base 19: mod_base = OTHER; note = 2'-O-methyladenosine-3'-phosphate
  modified_base 20: mod_base = OTHER; note = 2'-O-methyluridine-3'-phosphate
  modified_base 21: mod_base = OTHER; note = 2'-O-methylguanosine-3'-phosphorothioate
  modified_base 22: mod_base = OTHER; note = 2'-O-methyladenosine-3'-phosphorothioate
  modified_base 23: mod_base = OTHER; note = 2'-O-methylguanosine
tttagagtgaggattaaaatgag

SEQ ID NO: 154 - RNA, 23 nt, synthetic construct
  source 1..23: mol_type = other RNA
ctcattttaatcctcactctaag

SEQ ID NO: 155 - protein, 36 aa, synthetic construct; identical to SEQ ID NO: 121
  SITE 36: note = C-terminal amide
  DISULFID 2..27: note = Internal crosslink
  DISULFID 17..29: note = Internal crosslink
  DISULFID 23..35: note = Internal crosslink
  SITE 1: note = N-terminal amide with 6-azidohexan-1-oic acid
  SITE 1: note = click conjugate triazole formed between the azide group and the dibenzoazacyclooctyne group of 1-(6-(6-(dibenzo[b,f]azacyclooct-4-yn-5-yl)-6-oxohexan-1-oy lamino)hexan-1-oyl)-4R-hydroxy-2S-hydroxymethylpyrrolidine

SEQ ID NO: 156 - protein, 9 aa, synthetic construct
  REGION 1..9: note = cyclic peptide
  SITE 8: note = D-proline
  SITE 9: note = N-methyllysine
  SITE 9: note = N-epsilon amide formed with 22-azido-17-oxo-4,7,10,13-tetraoxa-16-aza-docosanoic acid
  SITE 9: note = click conjugate triazole formed between the azide group and the dibenzoazacyclooctyne group of 1-(6-(6-(dibenzo[b,f]azacyclooct-4-yn-5-yl)-6-oxohexan-1-oy lamino)hexan-1-oyl)-4R-hydroxy-2S-hydroxymethylpyrrolidine
FRGDLAFPK

SEQ ID NO: 157-220 - skipped (64 entries)

SEQ ID NO: 221 - RNA, 2819 nt, Homo sapiens
  source 1..2819: mol_type = mRNA
agattcactggtgtggcaagttgtctctcagactgtacatgcattaaaattttgcttggcattactcaaaagcaaaagaaaagtaaaaggaagaaacaagaacaagaaaaaagattatattgattttaaaatcatgcaaaaactgcaactctgtgtttatatttacctgtttatgctgattgttgctggtccagtggatctaaatgagaacagtgagcaaaaagaaaatgtggaaaaagaggggctgtgtaatgcatgtacttggagacaaaacactaaatcttcaagaatagaagccattaagatacaaatcctcagtaaacttcgtctggaaacagctcctaacatcagcaaagatgttataagacaacttttacccaaagctcctccactccgggaactgattgatcagtatgatgtccagagggatgacagcagcgatggctctttggaagatgacgattatcacgctacaacggaaacaatcattaccatgcctacagagtctgattttctaatgcaagtggatggaaaacccaaatgttgcttctttaaatttagctctaaaatacaatacaataaagtagtaaaggcccaactatggatatatttgagacccgtcgagactcctacaacagtgtttgtgcaaatcctgagactcatcaaacctatgaaagacggtacaaggtatactggaatccgatctctgaaacttgacatgaacccaggcactggtatttggcagagcattgatgtgaagacagtgttgcaaaattggctcaaacaacctgaatccaacttaggcattgaaataaaagctttagatgagaatggtcatgatcttgctgtaaccttcccaggaccaggagaagatgggctgaatccgtttttagaggtcaaggtaacagacacaccaaaaagatccagaagggattttggtcttgactgtgatgagcactcaacagaatcacgatgctgtcgttaccctctaactgtggattttgaagcttttggatgggattggattatcgctcctaaaagatataaggccaattactgctctggagagtgtgaatttgtatttttacaaaaatatcctcatactcatctggtacaccaagcaaaccccagaggttcagcaggcccttgctgtactcccacaaagatgtctccaattaatatgctatattttaatggcaaagaacaaataatatatgggaaaattccagcgatggtagtagaccgctgtgggtgctcatgagatttatattaagcgttcataacttcctaaaacatggaaggttttcccctcaacaattttgaagctgtgaaattaagtaccacaggctataggcctagagtatgctacagtcacttaagcataagctacagtatgtaaactaaaagggggaatatatgcaatggttggcatttaaccatccaaacaaatcatacaagaaagttttatgatttccagagtttttgagctagaaggagatcaaattacatttatgttcctatatattacaacatcggcgaggaaatgaaagcgattctccttgagttctgatgaattaaaggagtatgctttaaagtctatttctttaaagttttgtttaatatttacagaaaaatccacatacagtattggtaaaatgcaggattgttatataccatcattcgaatcatccttaaacacttgaatttatattgtatggtagtatacttggtaagataaaattccacaaaaatagggatggtgcagcatatgcaatttccattcctattataattgacacagtacattaacaatccatgccaacggtgctaatacgataggctgaatgtctgaggctaccaggtttatcacataaaaaacattcagtaaaatagtaagtttctcttttcttcaggtgcattttcctacacctccaaatgaggaatggattttctttaatgtaagaagaatcatttttctagaggttggctttcaattctgtagcatacttggagaaactgcattatcttaaaaggcagtcaaatggtgtttgtttttatcaaaatgtcaaaataacatacttggagaagtatgtaattttgtctttggaaaattacaacactgcctttgcaacactgcagtttttatggtaaaataatagaaatgatcgactctatcaatattgtataaaaagactgaaacaatgcatttatataatatgtatacaatattgttttgtaaataagtgtctccttttttatttactttggtatatttttacactaaggacatttcaaattaagtactaaggcacaaagacatgtcatgcatcacagaaaagcaactacttatatttcagagcaaattagcagattaaatagtggtcttaaaactccatatgttaatgattagatggttatattacaatcattttatatttttttacatgattaacattcacttatggattcatgatggctgtataaagtgaatttgaaatttcaatggtttactgtcattgtgtttaaatctcaacgttccattattttaatacttgcaaaaacattactaagtataccaaaataattgactctattatctgaaatgaagaataaactgatgctatctcaacaataactgttacttttattttataatttgataatgaatatatttctgcatttatttacttctgttttgtaaattgggattttgttaatcaaatttattgtactatgactaaatgaaattatttcttacatctaatttgtagaaacagtataagttatattaaagtgttttcacatttttttgaaagaca

SEQ ID NO: 222 - RNA, 2819 nt, Homo sapiens
  source 1..2819: mol_type = mRNA
tgtctttcaaaaaaatgtgaaaacactttaatataacttatactgtttctacaaattagatgtaagaaataatttcatttagtcatagtacaataaatttgattaacaaaatcccaatttacaaaacagaagtaaataaatgcagaaatatattcattatcaaattataaaataaaagtaacagttattgttgagatagcatcagtttattcttcatttcagataatagagtcaattattttggtatacttagtaatgtttttgcaagtattaaaataatggaacgttgagatttaaacacaatgacagtaaaccattgaaatttcaaattcactttatacagccatcatgaatccataagtgaatgttaatcatgtaaaaaaatataaaatgattgtaatataaccatctaatcattaacatatggagttttaagaccactatttaatctgctaatttgctctgaaatataagtagttgcttttctgtgatgcatgacatgtctttgtgccttagtacttaatttgaaatgtccttagtgtaaaaatataccaaagtaaataaaaaaggagacacttatttacaaaacaatattgtatacatattatataaatgcattgtttcagtctttttatacaatattgatagagtcgatcatttctattattttaccataaaaactgcagtgttgcaaaggcagtgttgtaattttccaaagacaaaattacatacttctccaagtatgttattttgacattttgataaaaacaaacaccatttgactgccttttaagataatgcagtttctccaagtatgctacagaattgaaagccaacctctagaaaaatgattcttcttacattaaagaaaatccattcctcatttggaggtgtaggaaaatgcacctgaagaaaagagaaacttactattttactgaatgttttttatgtgataaacctggtagcctcagacattcagcctatcgtattagcaccgttggcatggattgttaatgtactgtgtcaattataataggaatggaaattgcatatgctgcaccatccctatttttgtggaattttatcttaccaagtatactaccatacaatataaattcaagtgtttaaggatgattcgaatgatggtatataacaatcctgcattttaccaatactgtatgtggatttttctgtaaatattaaacaaaactttaaagaaatagactttaaagcatactcctttaattcatcagaactcaaggagaatcgctttcatttcctcgccgatgttgtaatatataggaacataaatgtaatttgatctccttctagctcaaaaactctggaaatcataaaactttcttgtatgatttgtttggatggttaaatgccaaccattgcatatattcccccttttagtttacatactgtagcttatgcttaagtgactgtagcatactctaggcctatagcctgtggtacttaatttcacagcttcaaaattgttgaggggaaaaccttccatgttttaggaagttatgaacgcttaatataaatctcatgagcacccacagcggtctactaccatcgctggaattttcccatatattatttgttctttgccattaaaatatagcatattaattggagacatctttgtgggagtacagcaagggcctgctgaacctctggggtttgcttggtgtaccagatgagtatgaggatatttttgtaaaaatacaaattcacactctccagagcagtaattggccttatatcttttaggagcgataatccaatcccatccaaaagcttcaaaatccacagttagagggtaacgacagcatcgtgattctgttgagtgctcatcacagtcaagaccaaaatcccttctggatctttttggtgtgtctgttaccttgacctctaaaaacggattcagcccatcttctcctggtcctgggaaggttacagcaagatcatgaccattctcatctaaagcttttatttcaatgcctaagttggattcaggttgtttgagccaattttgcaacactgtcttcacatcaatgctctgccaaataccagtgcctgggttcatgtcaagtttcagagatcggattccagtataccttgtaccgtctttcataggtttgatgagtctcaggatttgcacaaacactgttgtaggagtctcgacgggtctcaaatatatccatagttgggcctttactactttattgtattgtattttagagctaaatttaaagaagcaacatttgggttttccatccacttgcattagaaaatcagactctgtaggcatggtaatgattgtttccgttgtagcgtgataatcgtcatcttccaaagagccatcgctgctgtcatccctctggacatcatactgatcaatcagttcccggagtggaggagctttgggtaaaagttgtcttataacatctttgctgatgttaggagctgtttccagacgaagtttactgaggatttgtatcttaatggcttctattcttgaagatttagtgttttgtctccaagtacatgcattacacagcccctctttttccacattttctttttgctcactgttctcatttagatccactggaccagcaacaatcagcataaacaggtaaatataaacacagagttgcagtttttgcatgattttaaaatcaatataatcttttttcttgttcttgtttcttccttttacttttcttttgcttttgagtaatgccaagcaaaattttaatgcatgtacagtctgagagacaacttgccacaccagtgaatct

SEQ ID NO: 223 - RNA, 2705 nt, Mus musculus
  source 1..2705: mol_type = mRNA
aggactccctggcgtggcaggttgtctctcggacggtacatgcactaatatttcacttggcattactcaaaagcaaaaagaagaaataagaacaagggaaaaaaaaagattgtgctgatttttaaaatgatgcaaaaactgcaaatgtatgtttatatttacctgttcatgctgattgctgctggcccagtggatctaaatgagggcagtgagagagaagaaaatgtggaaaaagaggggctgtgtaatgcatgtgcgtggagacaaaacacgaggtactccagaatagaagccataaaaattcaaatcctcagtaagctgcgcctggaaacagctcctaacatcagcaaagatgctataagacaacttctgccaagagcgcctccactccgggaactgatcgatcagtacgacgtccagagggatgacagcagtgatggctctttggaagatgacgattatcacgctaccacggaaacaatcattaccatgcctacagagtctgactttctaatgcaagcggatggcaagcccaaatgttgcttttttaaatttagctctaaaatacagtacaacaaagtagtaaaagcccaactgtggatatatctcagacccgtcaagactcctacaacagtgtttgtgcaaatcctgagactcatcaaacccatgaaagacggtacaaggtatactggaatccgatctctgaaacttgacatgagcccaggcactggtatttggcagagtattgatgtgaagacagtgttgcaaaattggctcaaacagcctgaatccaacttaggcattgaaatcaaagctttggatgagaatggccatgatcttgctgtaaccttcccaggaccaggagaagatgggctgaatccctttttagaagtcaaggtgacagacacacccaagaggtcccggagagactttgggcttgactgcgatgagcactccacggaatcccggtgctgccgctaccccctcacggtcgattttgaagcctttggatgggactggattatcgcacccaaaagatataaggccaattactgctcaggagagtgtgaatttgtgtttttacaaaaatatccgcatactcatcttgtgcaccaagcaaaccccagaggctcagcaggcccttgctgcactccgacaaaaatgtctcccattaatatgctatattttaatggcaaagaacaaataatatatgggaaaattccagccatggtagtagaccgctgtgggtgctcatgagctttgcattaggttagaaatttcccaagtcatggaaggtcttcccctcaatttcgaaactgtgaattcaagcaccacaggctgtaggccttgagtatgctctagtaacgtaagcacaagctacagtgtatgaactaaaagagagaatagatgcaatggttggcattcaaccaccaaaataaaccatactataggatgttgtatgatttccagagtttttgaaatagatggagatcaaattacatttatgtccatatatgtatattacaactacaatctaggcaaggaagtgagagcacatcttgtggtctgctgagttaggagggtatgattaaaaggtaaagtcttatttcctaacagtttcacttaatatttacggaagaatctatatgtagcctttgtaaagtgtaggattgttatcatttaaaaacatcatgtacacttatatttgtattgtatacttggtaagataaaattccacaaagtaggaatggggccttacatacacattgccattcctattataattggacaatccaccacggtgctaatgcagtgctgaatggctcctactggacctctcgatagaacactctacaaagtacgagtctctctctcccttccaggtgcatctccacacacacagcactaagtgttcaatgcattttctttaaggaaagaagaatctttttttctagaggtcaactttcagtcaactctagcacagcgggagtgactgctgcatcttaaaaggcagccaaacagtattcattttttaatctaaatttcaaaatcactgtctgcctttatcacatggcaattttgtggtaaaataatggaaatgactggttctatcaatattgtataaaagactctgaaacaattacatttatataatatgtatacaatattgttttgtaaataagtgtctccttttatatttactttggtatatttttacactaatgaaatttcaaatcattaaagtacaaagacatgtcatgtatcacaaaaaaggtgactgcttctatttcagagtgaattagcagattcaatagtggtcttaaaactctgtatgttaagattagaaggttatattacaatcaatttatgtattttttacattatcaacattcacttatggtttcatggtggctgtatctatgaatgtggctcccagtcaaatttcaatgccccaccattttaaaaattacaagcattactaaacataccaacatgtatctaaagaaatacaaatatggtatctcaataacagctacttttttattttataatttgacaatgaatacatttcttttatttacttcagttttataaattggaactttgtttatcaaatgtattgtactcatagctaaatgaaattatttcttacataaaaatgtgtagaaactataaattaaagtgttttcacatttttgaaaggc

SEQ ID NO: 224 - RNA, 2705 nt, Mus musculus
  source 1..2705: mol_type = mRNA
gcctttcaaaaatgtgaaaacactttaatttatagtttctacacatttttatgtaagaaataatttcatttagctatgagtacaatacatttgataaacaaagttccaatttataaaactgaagtaaataaaagaaatgtattcattgtcaaattataaaataaaaaagtagctgttattgagataccatatttgtatttctttagatacatgttggtatgtttagtaatgcttgtaatttttaaaatggtggggcattgaaatttgactgggagccacattcatagatacagccaccatgaaaccataagtgaatgttgataatgtaaaaaatacataaattgattgtaatataaccttctaatcttaacatacagagttttaagaccactattgaatctgctaattcactctgaaatagaagcagtcaccttttttgtgatacatgacatgtctttgtactttaatgatttgaaatttcattagtgtaaaaatataccaaagtaaatataaaaggagacacttatttacaaaacaatattgtatacatattatataaatgtaattgtttcagagtcttttatacaatattgatagaaccagtcatttccattattttaccacaaaattgccatgtgataaaggcagacagtgattttgaaatttagattaaaaaatgaatactgtttggctgccttttaagatgcagcagtcactcccgctgtgctagagttgactgaaagttgacctctagaaaaaaagattcttctttccttaaagaaaatgcattgaacacttagtgctgtgtgtgtggagatgcacctggaagggagagagagactcgtactttgtagagtgttctatcgagaggtccagtaggagccattcagcactgcattagcaccgtggtggattgtccaattataataggaatggcaatgtgtatgtaaggccccattcctactttgtggaattttatcttaccaagtatacaatacaaatataagtgtacatgatgtttttaaatgataacaatcctacactttacaaaggctacatatagattcttccgtaaatattaagtgaaactgttaggaaataagactttaccttttaatcataccctcctaactcagcagaccacaagatgtgctctcacttccttgcctagattgtagttgtaatatacatatatggacataaatgtaatttgatctccatctatttcaaaaactctggaaatcatacaacatcctatagtatggtttattttggtggttgaatgccaaccattgcatctattctctcttttagttcatacactgtagcttgtgcttacgttactagagcatactcaaggcctacagcctgtggtgcttgaattcacagtttcgaaattgaggggaagaccttccatgacttgggaaatttctaacctaatgcaaagctcatgagcacccacagcggtctactaccatggctggaattttcccatatattatttgttctttgccattaaaatatagcatattaatgggagacatttttgtcggagtgcagcaagggcctgctgagcctctggggtttgcttggtgcacaagatgagtatgcggatatttttgtaaaaacacaaattcacactctcctgagcagtaattggccttatatcttttgggtgcgataatccagtcccatccaaaggcttcaaaatcgaccgtgagggggtagcggcagcaccgggattccgtggagtgctcatcgcagtcaagcccaaagtctctccgggacctcttgggtgtgtctgtcaccttgacttctaaaaagggattcagcccatcttctcctggtcctgggaaggttacagcaagatcatggccattctcatccaaagctttgatttcaatgcctaagttggattcaggctgtttgagccaattttgcaacactgtcttcacatcaatactctgccaaataccagtgcctgggctcatgtcaagtttcagagatcggattccagtataccttgtaccgtctttcatgggtttgatgagtctcaggatttgcacaaacactgttgtaggagtcttgacgggtctgagatatatccacagttgggcttttactactttgttgtactgtattttagagctaaatttaaaaaagcaacatttgggcttgccatccgcttgcattagaaagtcagactctgtaggcatggtaatgattgtttccgtggtagcgtgataatcgtcatcttccaaagagccatcactgctgtcatccctctggacgtcgtactgatcgatcagttcccggagtggaggcgctcttggcagaagttgtcttatagcatctttgctgatgttaggagctgtttccaggcgcagcttactgaggatttgaatttttatggcttctattctggagtacctcgtgttttgtctccacgcacatgcattacacagcccctctttttccacattttcttctctctcactgccctcatttagatccactgggccagcagcaatcagcatgaacaggtaaatataaacatacatttgcagtttttgcatcattttaaaaatcagcacaatctttttttttcccttgttcttatttcttctttttgcttttgagtaatgccaagtgaaatattagtgcatgtaccgtccgagagacaacctgccacgccagggagtcct

SEQ ID NO: 225 - RNA, 1131 nt, Rattus norvegicus
  source 1..1131: mol_type = mRNA
atgattcaaaaaccgcaaatgtatgtttatatttacctgtttgtgctgattgctgctggcccagtggatctaaatgaggacagtgagagagaggcgaatgtggaaaaagaggggctgtgtaatgcgtgtgcgtggagacaaaacacaaggtactccagaatagaagccataaaaattcaaatcctcagtaaactccgcctggaaacagcgcctaacatcagcaaagatgctataagacaacttctgcccagagcgcctccactccgggaactgatcgatcagtacgacgtccagagggatgacagcagtgacggctctttggaagatgacgattatcacgctaccacggaaacaatcattaccatgcctaccgagtctgactttctaatgcaagcggatggaaagcccaaatgttgcttttttaaatttagctctaaaatacagtacaacaaagtggtaaaggcccagctgtggatatatctgagagccgtcaagactcctacaacagtgtttgtgcaaatcctgagactcatcaaacccatgaaagacggtacaaggtataccggaatccgatctctgaaacttgacatgagcccaggcactggtatttggcagagtattgatgtgaagacagtgttgcaaaattggctcaaacagcctgaatccaacttaggcattgaaatcaaagctttggatgagaatgggcatgatcttgctgtaaccttcccaggaccaggagaagatgggctgaatccctttttagaagtcaaagtaacagacacacccaagaggtcccggagagactttgggcttgactgtgatgaacactccacggaatcgcggtgctgtcgctaccccctcacggtcgatttcgaagcctttggatgggactggattattgcacccaaaagatataaggctaattactgctctggagagtgtgaatttgtgttcttacaaaaatatccgcatactcatcttgtgcaccaagcaaaccccagaggctcggcaggcccttgctgcacgccaacaaaaatgtctcccattaatatgctatattttaatggcaaagaacaaataatatatgggaaaattccagccatggtagtagaccggtgtgggtgctcgtga

SEQ ID NO: 226 - RNA, 1131 nt, Rattus norvegicus
  source 1..1131: mol_type = mRNA
tcacgagcacccacaccggtctactaccatggctggaattttcccatatattatttgttctttgccattaaaatatagcatattaatgggagacatttttgttggcgtgcagcaagggcctgccgagcctctggggtttgcttggtgcacaagatgagtatgcggatatttttgtaagaacacaaattcacactctccagagcagtaattagccttatatcttttgggtgcaataatccagtcccatccaaaggcttcgaaatcgaccgtgagggggtagcgacagcaccgcgattccgtggagtgttcatcacagtcaagcccaaagtctctccgggacctcttgggtgtgtctgttactttgacttctaaaaagggattcagcccatcttctcctggtcctgggaaggttacagcaagatcatgcccattctcatccaaagctttgatttcaatgcctaagttggattcaggctgtttgagccaattttgcaacactgtcttcacatcaatactctgccaaataccagtgcctgggctcatgtcaagtttcagagatcggattccggtataccttgtaccgtctttcatgggtttgatgagtctcaggatttgcacaaacactgttgtaggagtcttgacggctctcagatatatccacagctgggcctttaccactttgttgtactgtattttagagctaaatttaaaaaagcaacatttgggctttccatccgcttgcattagaaagtcagactcggtaggcatggtaatgattgtttccgtggtagcgtgataatcgtcatcttccaaagagccgtcactgctgtcatccctctggacgtcgtactgatcgatcagttcccggagtggaggcgctctgggcagaagttgtcttatagcatctttgctgatgttaggcgctgtttccaggcggagtttactgaggatttgaatttttatggcttctattctggagtaccttgtgttttgtctccacgcacacgcattacacagcccctctttttccacattcgcctctctctcactgtcctcatttagatccactgggccagcagcaatcagcacaaacaggtaaatataaacatacatttgcggtttttgaatcat

SEQ ID NO: 227 - RNA, 1128 nt, Macaca fascicularis
  source 1..1128: mol_type = mRNA
atgcaaaaactgcaactctgtgtttatatttacctgtttatgctgattgttgctggtccagtggatctaaatgagaacagtgagcaaaaagaaaatgtggaaaaagaggggctgtgtaatgcatgtacttggagacaaaacactaaatcttcaagaatagaagccattaaaatacaaatcctcagtaaacttcgtctggaaacagctcctaacatcagcaaagatgctataagacaacttttacccaaagctcctccactccgggaactgattgatcagtatgatgtccagagggatgacagcagcgatggctctttggaagatgacgattatcacgctacaactgaaacaatcattaccatgcctacagagtctgattttttaatgcaagtggatggaaaacccaaatgttgcttctttaaatttagctctaaaatacaatacaataaagtggtaaaggcccaactatggatatatttgagacccgtcgagactcctacaacagtgtttgtgcaaatcctgagactcatcaaacctatgaaagacggtacaaggtatactggaatccgatctctgaaacttgacatgaacccaggcactggtatttggcagagcattgatgtgaagacagtgttgcaaaattggctcaaacaacctgaatccaacttaggcattgaaataaaagctttagatgagaatggtcatgatcttgctgtaaccttcccaggaccaggagaagatgggctgaatccctttttagaggtcaaggtaacagacacaccaaaaagatccagaagggattttggtcttgactgtgatgagcactcaacagaatcgcgatgctgtcgttaccctctaactgtggattttgaagcttttggatgggattggattatcgctcctaaaagatataaggccaattactgctctggagagtgtgaatttgtatttttacaaaaatatcctcatactcatctggtacaccaagcaaaccccagaggttcagcaggcccttgctgtactcccacaaagatgtctccaattaatatgctatattttaatggcaaagaacaaataatatatgggaaaattccagccatggtagtagaccgctgcgggtgctcatga

SEQ ID NO: 228 - RNA, 1128 nt, Macaca fascicularis
  source 1..1128: mol_type = mRNA
tcatgagcacccgcagcggtctactaccatggctggaattttcccatatattatttgttctttgccattaaaatatagcatattaattggagacatctttgtgggagtacagcaagggcctgctgaacctctggggtttgcttggtgtaccagatgagtatgaggatatttttgtaaaaatacaaattcacactctccagagcagtaattggccttatatcttttaggagcgataatccaatcccatccaaaagcttcaaaatccacagttagagggtaacgacagcatcgcgattctgttgagtgctcatcacagtcaagaccaaaatcccttctggatctttttggtgtgtctgttaccttgacctctaaaaagggattcagcccatcttctcctggtcctgggaaggttacagcaagatcatgaccattctcatctaaagcttttatttcaatgcctaagttggattcaggttgtttgagccaattttgcaacactgtcttcacatcaatgctctgccaaataccagtgcctgggttcatgtcaagtttcagagatcggattccagtataccttgtaccgtctttcataggtttgatgagtctcaggatttgcacaaacactgttgtaggagtctcgacgggtctcaaatatatccatagttgggcctttaccactttattgtattgtattttagagctaaatttaaagaagcaacatttgggttttccatccacttgcattaaaaaatcagactctgtaggcatggtaatgattgtttcagttgtagcgtgataatcgtcatcttccaaagagccatcgctgctgtcatccctctggacatcatactgatcaatcagttcccggagtggaggagctttgggtaaaagttgtcttatagcatctttgctgatgttaggagctgtttccagacgaagtttactgaggatttgtattttaatggcttctattcttgaagatttagtgttttgtctccaagtacatgcattacacagcccctctttttccacattttctttttgctcactgttctcatttagatccactggaccagcaacaatcagcataaacaggtaaatataaacacagagttgcagtttttgcat

SEQ ID NO: 229 - RNA, 1128 nt, Macaca mulatta
  source 1..1128: mol_type = mRNA
atgcaaaaactgcaactctgtgtttatatttacctgtttatgctgattgttgctggtccagtggatctaaatgagaacagtgagcaaaaagaaaatgtggaaaaagaggggctgtgtaatgcatgtacttggagacaaaacactaaatcttcaagaatagaagccattaaaatacaaatcctcagtaaacttcgtctggaaacagctcctaacatcagcaaagatgctataagacaacttttacccaaagctcctccactccgggaactgattgatcagtatgatgtccagagggatgacagcagcgatggctctttggaagatgacgattatcacgctacaactgaaacaatcattaccatgcctacagagtctgattttttaatgcaagtggatggaaaacccaaatgttgcttctttaaatttagctctaaaatacaatacaataaagtggtaaaggcccaactatggatatatttgagacccgtcgagactcctacaacagtgtttgtgcaaatcctgagactcatcaaacctatgaaagacggtacaaggtatactggaatccgatctctgaaacttgacatgaacccaggcactggtatttggcagagcattgatgtgaagacagtgttgcaaaattggctcaaacaacctgaatccaacttaggcattgaaataaaagctttagatgagaatggtcatgatcttgctgtaaccttcccaggaccaggagaagatgggctgaatccgtttttagaggtcaaggtaacagacacaccaaaaagatccagaagggattttggtcttgactgtgatgagcactcaacagaatcacgatgctgtcgttaccctctaactgtggattttgaagcttttggatgggattggattatcgctcctaaaagatataaggccaattactgctctggagagtgtgaatttgtatttttacaaaaatatcctcatactcatctggtacaccaagcaaaccccagaggttcagcaggcccttgctgtactcccacaaagatgtctccaattaatatgctatattttaatggcaaagaacaaataatatatgggaaaattccagcgatggtagtagaccgctgtgggtgctcatga

SEQ ID NO: 230 - RNA, 1128 nt, Macaca mulatta
  source 1..1128: mol_type = mRNA
tcatgagcacccacagcggtctactaccatcgctggaattttcccatatattatttgttctttgccattaaaatatagcatattaattggagacatctttgtgggagtacagcaagggcctgctgaacctctggggtttgcttggtgtaccagatgagtatgaggatatttttgtaaaaatacaaattcacactctccagagcagtaattggccttatatcttttaggagcgataatccaatcccatccaaaagcttcaaaatccacagttagagggtaacgacagcatcgtgattctgttgagtgctcatcacagtcaagaccaaaatcccttctggatctttttggtgtgtctgttaccttgacctctaaaaacggattcagcccatcttctcctggtcctgggaaggttacagcaagatcatgaccattctcatctaaagcttttatttcaatgcctaagttggattcaggttgtttgagccaattttgcaacactgtcttcacatcaatgctctgccaaataccagtgcctgggttcatgtcaagtttcagagatcggattccagtataccttgtaccgtctttcataggtttgatgagtctcaggatttgcacaaacactgttgtaggagtctcgacgggtctcaaatatatccatagttgggcctttaccactttattgtattgtattttagagctaaatttaaagaagcaacatttgggttttccatccacttgcattaaaaaatcagactctgtaggcatggtaatgattgtttcagttgtagcgtgataatcgtcatcttccaaagagccatcgctgctgtcatccctctggacatcatactgatcaatcagttcccggagtggaggagctttgggtaaaagttgtcttatagcatctttgctgatgttaggagctgtttccagacgaagtttactgaggatttgtattttaatggcttctattcttgaagatttagtgttttgtctccaagtacatgcattacacagcccctctttttccacattttctttttgctcactgttctcatttagatccactggaccagcaacaatcagcataaacaggtaaatataaacacagagttgcagtttttgcat

SEQ ID NO: 231 - RNA, 2059 nt, Homo sapiens
  source 1..2059: mol_type = mRNA
agacaagcacccagccagagtgccagtgagaagcacaggccaccactctgccctggtccacacaagctccggtagcccatggagccctggcctctcctcctgctctttagcctttgctcagctggcctcgtcctgggctccgaacatgagacccgtctggtggcaaagctatttaaagactacagcagcgtggtgcggccagtggaagaccaccgccaggtcgtggaggtcaccgtgggcctgcagctgatacagctcatcaatgtggatgaagtaaatcagatcgtgacaaccaatgtgcgtctgaaacagggtgacatggtagatctgccacgccccagctgcgtgactttgggagttcctttgttttctcatctgcagaatgagcaatgggtggattacaacctaaaatggaatccagatgactatggcggtgtgaaaaaaattcacattccttcagaaaagatctggcgcccagaccttgttctctataacaatgcagatggtgactttgctattgtcaagttcaccaaagtgctcctgcagtacactggccacatcacgtggacacctccagccatctttaaaagctactgtgagatcatcgtcacccactttccctttgatgaacagaactgcagcatgaagctgggcacctggacctacgacggctctgtcgtggccatcaacccggaaagcgaccagccagacctgagcaacttcatggagagcggggagtgggtgatcaaggagtcccggggctggaagcactccgtgacctattcctgctgccccgacaccccctacctggacatcacctaccacttcgtcatgcagcgcctgcccctctacttcatcgtcaacgtcatcatcccctgcctgctcttctccttcttaactggcctggtattctacctgcccacagactcaggggagaagatgactctgagcatctctgtcttactgtctttgactgtgttccttctggtcatcgtggagctgatcccctccacgtccagtgctgtgcccttgattggaaaatacatgctgttcaccatggtgttcgtcattgcctccatcatcatcactgtcatcgtcatcaacacacaccaccgctcacccagcacccatgtcatgcccaactgggtgcggaaggtttttatcgacactatcccaaatatcatgtttttctccacaatgaaaagaccatccagagaaaagcaagacaaaaagatttttacagaagacattgatatctctgacatttctggaaagccagggcctccacccatgggcttccactctcccctgatcaaacaccccgaggtgaaaagtgccatcgagggcatcaagtacatcgcagagaccatgaagtcagaccaggagtctaacaatgcggcggcagagtggaagtacgttgcaatggtgatggaccacatactcctcggagtcttcatgcttgtttgcatcatcggaaccctagccgtgtttgcaggtcgactcattgaattaaatcagcaaggatgagcagaaaatgagctgagcttagctctgccctggaacctaccagagcagagaagggcaggagaggaagatttgtctacttgctccactcgcacttatcaaacgtgttatattccatacttattattgatgataagatttacctttatgtaagtttatggccttgaagtgttttcatattgcttctccctttagttctgctgtctccctgaagagtgaaccctctttagtaaatgaaactaatcactaaaaaaagtgttcatttccagtgtctggaagagtttttgccaggataaccgaggttttctgttgcattgtcattgctgttatatttatatatttacttattttgtctaaccacgagaccactagggagttgctgatgttctaaatgaagtgtattctttgcttaagagtcagttttgtacctactaagaaaaccccatctaccagtcctaaagagataaggcatttgatttggagagagaggaagcagtagaaatgaaataaactaaaatgcaaactgcatcaaaaa

SEQ ID NO: 232 - RNA, 2059 nt, Homo sapiens
  source 1..2059: mol_type = mRNA
tttttgatgcagtttgcattttagtttatttcatttctactgcttcctctctctccaaatcaaatgccttatctctttaggactggtagatggggttttcttagtaggtacaaaactgactcttaagcaaagaatacacttcatttagaacatcagcaactccctagtggtctcgtggttagacaaaataagtaaatatataaatataacagcaatgacaatgcaacagaaaacctcggttatcctggcaaaaactcttccagacactggaaatgaacactttttttagtgattagtttcatttactaaagagggttcactcttcagggagacagcagaactaaagggagaagcaatatgaaaacacttcaaggccataaacttacataaaggtaaatcttatcatcaataataagtatggaatataacacgtttgataagtgcgagtggagcaagtagacaaatcttcctctcctgcccttctctgctctggtaggttccagggcagagctaagctcagctcattttctgctcatccttgctgatttaattcaatgagtcgacctgcaaacacggctagggttccgatgatgcaaacaagcatgaagactccgaggagtatgtggtccatcaccattgcaacgtacttccactctgccgccgcattgttagactcctggtctgacttcatggtctctgcgatgtacttgatgccctcgatggcacttttcacctcggggtgtttgatcaggggagagtggaagcccatgggtggaggccctggctttccagaaatgtcagagatatcaatgtcttctgtaaaaatctttttgtcttgcttttctctggatggtcttttcattgtggagaaaaacatgatatttgggatagtgtcgataaaaaccttccgcacccagttgggcatgacatgggtgctgggtgagcggtggtgtgtgttgatgacgatgacagtgatgatgatggaggcaatgacgaacaccatggtgaacagcatgtattttccaatcaagggcacagcactggacgtggaggggatcagctccacgatgaccagaaggaacacagtcaaagacagtaagacagagatgctcagagtcatcttctcccctgagtctgtgggcaggtagaataccaggccagttaagaaggagaagagcaggcaggggatgatgacgttgacgatgaagtagaggggcaggcgctgcatgacgaagtggtaggtgatgtccaggtagggggtgtcggggcagcaggaataggtcacggagtgcttccagccccgggactccttgatcacccactccccgctctccatgaagttgctcaggtctggctggtcgctttccgggttgatggccacgacagagccgtcgtaggtccaggtgcccagcttcatgctgcagttctgttcatcaaagggaaagtgggtgacgatgatctcacagtagcttttaaagatggctggaggtgtccacgtgatgtggccagtgtactgcaggagcactttggtgaacttgacaatagcaaagtcaccatctgcattgttatagagaacaaggtctgggcgccagatcttttctgaaggaatgtgaatttttttcacaccgccatagtcatctggattccattttaggttgtaatccacccattgctcattctgcagatgagaaaacaaaggaactcccaaagtcacgcagctggggcgtggcagatctaccatgtcaccctgtttcagacgcacattggttgtcacgatctgatttacttcatccacattgatgagctgtatcagctgcaggcccacggtgacctccacgacctggcggtggtcttccactggccgcaccacgctgctgtagtctttaaatagctttgccaccagacgggtctcatgttcggagcccaggacgaggccagctgagcaaaggctaaagagcaggaggagaggccagggctccatgggctaccggagcttgtgtggaccagggcagagtggtggcctgtgcttctcactggcactctggctgggtgcttgtct

SEQ ID NO: 233 - RNA, 4320 nt, Mus musculus
  source 1..4320: mol_type = mRNA
ggagtaggaccggcagcaagccgctggcggccacagcggcacccacagcccatggagctctcgactgttctcctgctgctaggcctctgctccgctggccttgttctgggctccgaacatgagacgcgtctggtggcaaagctctttgaagactacagcagtgtagtccggccagtggaggaccaccgtgagattgtacaagtcaccgtgggtctacagctgatccagcttatcaatgtggatgaagtaaatcagattgtgacaaccaatgtacgtctgaaacagcaatgggtcgattacaacttgaaatggaatccagatgactatggaggagtgaaaaaaattcacatcccctcggaaaagatctggcggccggacgtcgttctctataacaacgcagacggcgactttgccattgtcaaattcaccaaggtgctcctggactacaccggccacatcacctggacaccgccagccatctttaaaagctactgtgagatcattgtcactcactttcccttcgatgagcagaactgcagcatgaagctgggcacctggacctatgacggctctgtggtggccattaacccggaaagtgaccagcccgacctgagtaacttcatggagagcggggagtgggtgatcaaggaagctcggggctggaagcactgggtgttctactcctgctgccccaccactccctacctggacatcacctaccacttcgtcatgcagcgcctgcccctctacttcattgtcaacgtcatcattccctgcctgctcttctccttcttaaccagcctggtgttctacctgcccacagactcaggggagaagatgacgctgagcatctctgtcttactgtccctgaccgtgttccttctggtcattgtggagctaatcccttccacctccagcgctgtgcccctgatcgggaagtatatgttgttcaccatggtctttgtcattgcgtccatcatcatcaccgtcatcgtcatcaacacacaccaccgttcgcccagcacccacatcatgcccgagtgggtgcggaaggtttttatcgacactatcccaaacatcatgtttttctccacaatgaaaagaccatccagagataaacaagagaaaaggatttttacagaagacatagatatatctgacatctctgggaagccgggtcctccacctatgggctttcactctccgctgatcaagcaccctgaggtgaaaagcgccatcgagggcgtgaagtacattgcagagaccatgaagtcagaccaggagtccaataacgccgctgaggaatggaagtatgttgccatggtgatggatcacatcctcctcggagtctttatgctggtgtgtctcatcgggacgctggctgtgtttgcaggtcggctcattgagttacatcaacaaggatgagcagaggctgagctaagcctacctctgtcccagccatagccatcgctaggaaagatggaagagaggaaggtctgtctccttgaatcctttcacacttaccaaacatgcagtgttctacatgtcctacatgttaatgagagtgatctctgctcacacggctgtattcttgaagtgtctcccctttgcttctgcttttaacactatgggcctccttaaagggcgaaccctttgaagtaaataaaagtgagccctcaaaagaagtgtttgcttctaaatggcccctgggagagttttgcttggatactcaaggttttctgtttgtattgccatggctagttgtttttgttttctttcctttaataaatataattgtacttatatgagtgatccgcctacgtgtatgtctcacatacacgcctagtgtccatgaaggtcagaagaaggtatcccatctcctagaactggaactacaaatggttgtgagcgtccacatggaacctgggaatcaggccctctggaagagcacccagtgttcttaaccactgaaccacccacctatcgggctcagttaatttttatttttaaagtgctgagagtcccttacttaagacacacggtttcatacctactagaaaagtcgtgtctaccagattccccagatttgatgtggacacaaaggaagtggtagaaaggaaattaggtaactttaaacttaaaaaaaaattgtgtgtgtgtgtgtgtgtgtgtgtgtgtgtgtgtgtacatactcgcacacattgatgaaattgggggacaacttttaggagttagttctcatcttttatctcatttgaggcaaagtatcttgtgatttctgccgctgtgttacattctcatgtaaagcttcctggggcattttcctttctatacttctcggcccatgaacagagtgcagggattccagatgcatgccgccatctccagcttttcataggtcctaggatagaatttaggtcgttaggtttgtccagcaaaaaactacttttacctgcttaatccatttcactggcccaaaggtaattttagggcgatcacatacaaatagtatcaaaacctcatggtttaaagtagacttctgaaaccaggagagggagaatgctttcttaagtgatttctgtttgagaggccttcttgaaagggcgcttgggattccttgggattgtacctagagctttgcacacagagctataactgagcctcagctctcccaacttaacggagcccctggattttgttctcaggacccgaggaagggcagatcccatcctcatcaagggtgtgcctctgaccccatgagaatcgtctcgcccgcatgggtttattttatccaaattgttttacacagtctccataatgtccctaatttacaaatggaaaaaaaaatttttggggaaagttaaactctgctccatctagaagtagaagaactgagatctgaacccagacagaacttaagattctaaaacaggggctggagagatggctctatggttaagatcattcccagcaaccacagggtgcatggtggctcacaaccatctacagtgggatctgatgccctctgctggtgtgcaggtgtgcatatacaaagcactcacacataaatacataaacaaacaaacaaatattttttaaagatttatttatttattatatgtaaatacactgtagctgtcttcagacactccagaagagggcatcagatcttgttacagatggttgtgagccaccatgtggttgctgggatttgaactctggaccttcagaagaacagtcgggtgctcttacccactgagccatctcaccagccccaaatattttttttaaaagtcaaaaagaaaagggattctaaaccgacttgcagctgatggggtcacctgctccctgctctcccagcatgcctggcgtgatctaagtagttctggtctgtgttggtggggactctgtgatatcctatttcctgccttctcaattaaaacccctggcttttccttcagtccttggacgcaatcatgtttggagttcaggccctatgaatggaaccagaaacgtatgcacacaccatcaccatttctgaaatctgaaaaataaattctctgtgccaaactctaggctctagtacaatttacccagaccaagaagccgtgtggctctggacgcagaaaaggcctttgaatcacaaacacatctgatccgtcatctccagggagagctataaactgcataaccaggaggccagtgcgagcccaggtggcttcaatctcctgagggacttcccatcacccctgcaccagtgctgggctctttcatctcaaatagtttgcactttaaagtggaaacaattggcagtttctcagaaagtcacactcgggtcaccaagtcactcagcagtcccattcccaggtagagagccaaagaaatcgaaagaaagacttacacaatttgtatgagaacgcgcacagaaggcaagagccagagaaagcggtctaggctccaacccacagacgacaagcaaaagggatgtggagaatgggttttggggtgtatgtgtgtaggcctggggggccatcgcctttttgttttgttgttgtttttgagatagagtttctcactggcctggaacttgccaagtagtttaggctggctaggcaggccattccgagatctgcctgtctcctctttctgcaaacaatttagttggcatgggttctggggctcttactcagatctaaaaacaagcattttgtcagttgatctaattctttagctttttctactcacgaccactttttgcttgagaaatgttatgtagaaatataaaatatgtataaaaataaataacaaagaaatttaatt

SEQ ID NO: 234 - RNA, 4320 nt, Mus musculus
  source 1..4320: mol_type = mRNA
aattaaatttctttgttatttatttttatacatattttatatttctacataacatttctcaagcaaaaagtggtcgtgagtagaaaaagctaaagaattagatcaactgacaaaatgcttgtttttagatctgagtaagagccccagaacccatgccaactaaattgtttgcagaaagaggagacaggcagatctcggaatggcctgcctagccagcctaaactacttggcaagttccaggccagtgagaaactctatctcaaaaacaacaacaaaacaaaaaggcgatggccccccaggcctacacacatacaccccaaaacccattctccacatcccttttgcttgtcgtctgtgggttggagcctagaccgctttctctggctcttgccttctgtgcgcgttctcatacaaattgtgtaagtctttctttcgatttctttggctctctacctgggaatgggactgctgagtgacttggtgacccgagtgtgactttctgagaaactgccaattgtttccactttaaagtgcaaactatttgagatgaaagagcccagcactggtgcaggggtgatgggaagtccctcaggagattgaagccacctgggctcgcactggcctcctggttatgcagtttatagctctccctggagatgacggatcagatgtgtttgtgattcaaaggccttttctgcgtccagagccacacggcttcttggtctgggtaaattgtactagagcctagagtttggcacagagaatttatttttcagatttcagaaatggtgatggtgtgtgcatacgtttctggttccattcatagggcctgaactccaaacatgattgcgtccaaggactgaaggaaaagccaggggttttaattgagaaggcaggaaataggatatcacagagtccccaccaacacagaccagaactacttagatcacgccaggcatgctgggagagcagggagcaggtgaccccatcagctgcaagtcggtttagaatcccttttctttttgacttttaaaaaaaatatttggggctggtgagatggctcagtgggtaagagcacccgactgttcttctgaaggtccagagttcaaatcccagcaaccacatggtggctcacaaccatctgtaacaagatctgatgccctcttctggagtgtctgaagacagctacagtgtatttacatataataaataaataaatctttaaaaaatatttgtttgtttgtttatgtatttatgtgtgagtgctttgtatatgcacacctgcacaccagcagagggcatcagatcccactgtagatggttgtgagccaccatgcaccctgtggttgctgggaatgatcttaaccatagagccatctctccagcccctgttttagaatcttaagttctgtctgggttcagatctcagttcttctacttctagatggagcagagtttaactttccccaaaaatttttttttccatttgtaaattagggacattatggagactgtgtaaaacaatttggataaaataaacccatgcgggcgagacgattctcatggggtcagaggcacacccttgatgaggatgggatctgcccttcctcgggtcctgagaacaaaatccaggggctccgttaagttgggagagctgaggctcagttatagctctgtgtgcaaagctctaggtacaatcccaaggaatcccaagcgccctttcaagaaggcctctcaaacagaaatcacttaagaaagcattctccctctcctggtttcagaagtctactttaaaccatgaggttttgatactatttgtatgtgatcgccctaaaattacctttgggccagtgaaatggattaagcaggtaaaagtagttttttgctggacaaacctaacgacctaaattctatcctaggacctatgaaaagctggagatggcggcatgcatctggaatccctgcactctgttcatgggccgagaagtatagaaaggaaaatgccccaggaagctttacatgagaatgtaacacagcggcagaaatcacaagatactttgcctcaaatgagataaaagatgagaactaactcctaaaagttgtcccccaatttcatcaatgtgtgcgagtatgtacacacacacacacacacacacacacacacacacacaatttttttttaagtttaaagttacctaatttcctttctaccacttcctttgtgtccacatcaaatctggggaatctggtagacacgacttttctagtaggtatgaaaccgtgtgtcttaagtaagggactctcagcactttaaaaataaaaattaactgagcccgataggtgggtggttcagtggttaagaacactgggtgctcttccagagggcctgattcccaggttccatgtggacgctcacaaccatttgtagttccagttctaggagatgggataccttcttctgaccttcatggacactaggcgtgtatgtgagacatacacgtaggcggatcactcatataagtacaattatatttattaaaggaaagaaaacaaaaacaactagccatggcaatacaaacagaaaaccttgagtatccaagcaaaactctcccaggggccatttagaagcaaacacttcttttgagggctcacttttatttacttcaaagggttcgccctttaaggaggcccatagtgttaaaagcagaagcaaaggggagacacttcaagaatacagccgtgtgagcagagatcactctcattaacatgtaggacatgtagaacactgcatgtttggtaagtgtgaaaggattcaaggagacagaccttcctctcttccatctttcctagcgatggctatggctgggacagaggtaggcttagctcagcctctgctcatccttgttgatgtaactcaatgagccgacctgcaaacacagccagcgtcccgatgagacacaccagcataaagactccgaggaggatgtgatccatcaccatggcaacatacttccattcctcagcggcgttattggactcctggtctgacttcatggtctctgcaatgtacttcacgccctcgatggcgcttttcacctcagggtgcttgatcagcggagagtgaaagcccataggtggaggacccggcttcccagagatgtcagatatatctatgtcttctgtaaaaatccttttctcttgtttatctctggatggtcttttcattgtggagaaaaacatgatgtttgggatagtgtcgataaaaaccttccgcacccactcgggcatgatgtgggtgctgggcgaacggtggtgtgtgttgatgacgatgacggtgatgatgatggacgcaatgacaaagaccatggtgaacaacatatacttcccgatcaggggcacagcgctggaggtggaagggattagctccacaatgaccagaaggaacacggtcagggacagtaagacagagatgctcagcgtcatcttctcccctgagtctgtgggcaggtagaacaccaggctggttaagaaggagaagagcaggcagggaatgatgacgttgacaatgaagtagaggggcaggcgctgcatgacgaagtggtaggtgatgtccaggtagggagtggtggggcagcaggagtagaacacccagtgcttccagccccgagcttccttgatcacccactccccgctctccatgaagttactcaggtcgggctggtcactttccgggttaatggccaccacagagccgtcataggtccaggtgcccagcttcatgctgcagttctgctcatcgaagggaaagtgagtgacaatgatctcacagtagcttttaaagatggctggcggtgtccaggtgatgtggccggtgtagtccaggagcaccttggtgaatttgacaatggcaaagtcgccgtctgcgttgttatagagaacgacgtccggccgccagatcttttccgaggggatgtgaatttttttcactcctccatagtcatctggattccatttcaagttgtaatcgacccattgctgtttcagacgtacattggttgtcacaatctgatttacttcatccacattgataagctggatcagctgtagacccacggtgacttgtacaatctcacggtggtcctccactggccggactacactgctgtagtcttcaaagagctttgccaccagacgcgtctcatgttcggagcccagaacaaggccagcggagcagaggcctagcagcaggagaacagtcgagagctccatgggctgtgggtgccgctgtggccgccagcggcttgctgccggtcctactcc

SEQ ID NO: 235 - RNA, 1850 nt, Rattus norvegicus
  source 1..1850: mol_type = mRNA
tgcagccagagtgccagggagtgggacaggctgctggaggccacaccagcgtccacagcccatggagctcaccgctgtcctcctgctgctgggcctctgctccgctggcactgttctgggctccgaacatgagactcgtctggtggcaaagctctttaaagactacagcagtgtggtccggccagtaggggaccaccgtgagattgtacaggtcactgtgggactgcaactgatccagcttatcaacgtggatgaagtaaatcagattgtgacaaccaacgttcgtctgaaacagcaatgggttgattacaacttgaaatggaatccagatgactatggaggagtgaaaaaaattcacatcccctcggaaaagatctggcggccggacgttgttctctataacaatgcagatggagactttgccattgtcaaattcaccaaggtgctcctggactacaccggtcacatcacctggacccctccagccatctttaaaagctactgtgagatcattgtcacccactttcccttcgatgagcagaactgcagcatgaagctgggcacttggacctatgacggctctgtggtggccatcaatccggaaagtgaccagcccgacctgagtaacttcatggagagcggagagtgggtgatcaaggaagcccggggctggaagcactgggtgttttactcctgctgccccaacaccccttatctggacatcacctaccacttcgtcatgcagcgtctgcctctctacttcattgtcaacgtcatcattccctgcctgctcttctccttcttaaccagtctggtgttctacctgcccacagactcaggggagaagatgacgctgagcatctctgtcttactgtccctgactgtgttccttctcgtcattgtggagctgatcccttccacctctagcgctgtacccctgatcgggaagtacatgttgtttaccatggtctttgtcattgcgtccataataatcaccgtcattgtcatcaacacacaccaccgttcgcccagcacccacatcatgcccgagtgggtgcggaaggtttttatcgacactatcccaaacatcatgtttttctccacaatgaaaagaccatccagagataaacaagaaaaaaggattttcacagaagacatagatatctctgacatctctgggaagccggggcctccacctatgggctttcattctccactgatcaagcaccctgaggtgaaaagcgccattgagggtgtgaagtacattgcagagaccatgaagtcagaccaggagtctaacaatgcgtctgaggagtggaagtatgtcgccatggtgatggaccacatcctcctcggagtctttatgctggtgtgtctcatcgggacgctggctgtgtttgcaggtcggctcattgagctacatcaacaaggatgagcagaagctgaactaagcctccctctgccccagctgcagccaccaccaggaaagatagaagagaggaaggcctgtctacttgaatcctttcgcgcttaccaagcacacagtgtgctacatgtcctgttaatgatagtggtctctgctcacactgctatgtccttaaagtatctcccctttgcttctgcttttaacaccatgggtctccttaaagagggaaccctttgtagtaaataaaagtgagtcctcgggctggagagatggctcagcggttaagagcacccgactgctcttccagaggtcatgagttcaattcccagcaaccacatggtggctcacaaccatctataaagagatctgatgccctcttctggtgtatctgaagacagctacagtgtacttatatataataaaa

SEQ ID NO: 236 - RNA, 1850 nt, Rattus norvegicus
  source 1..1850: mol_type = mRNA
ttttattatatataagtacactgtagctgtcttcagatacaccagaagagggcatcagatctctttatagatggttgtgagccaccatgtggttgctgggaattgaactcatgacctctggaagagcagtcgggtgctcttaaccgctgagccatctctccagcccgaggactcacttttatttactacaaagggttccctctttaaggagacccatggtgttaaaagcagaagcaaaggggagatactttaaggacatagcagtgtgagcagagaccactatcattaacaggacatgtagcacactgtgtgcttggtaagcgcgaaaggattcaagtagacaggccttcctctcttctatctttcctggtggtggctgcagctggggcagagggaggcttagttcagcttctgctcatccttgttgatgtagctcaatgagccgacctgcaaacacagccagcgtcccgatgagacacaccagcataaagactccgaggaggatgtggtccatcaccatggcgacatacttccactcctcagacgcattgttagactcctggtctgacttcatggtctctgcaatgtacttcacaccctcaatggcgcttttcacctcagggtgcttgatcagtggagaatgaaagcccataggtggaggccccggcttcccagagatgtcagagatatctatgtcttctgtgaaaatccttttttcttgtttatctctggatggtcttttcattgtggagaaaaacatgatgtttgggatagtgtcgataaaaaccttccgcacccactcgggcatgatgtgggtgctgggcgaacggtggtgtgtgttgatgacaatgacggtgattattatggacgcaatgacaaagaccatggtaaacaacatgtacttcccgatcaggggtacagcgctagaggtggaagggatcagctccacaatgacgagaaggaacacagtcagggacagtaagacagagatgctcagcgtcatcttctcccctgagtctgtgggcaggtagaacaccagactggttaagaaggagaagagcaggcagggaatgatgacgttgacaatgaagtagagaggcagacgctgcatgacgaagtggtaggtgatgtccagataaggggtgttggggcagcaggagtaaaacacccagtgcttccagccccgggcttccttgatcacccactctccgctctccatgaagttactcaggtcgggctggtcactttccggattgatggccaccacagagccgtcataggtccaagtgcccagcttcatgctgcagttctgctcatcgaagggaaagtgggtgacaatgatctcacagtagcttttaaagatggctggaggggtccaggtgatgtgaccggtgtagtccaggagcaccttggtgaatttgacaatggcaaagtctccatctgcattgttatagagaacaacgtccggccgccagatcttttccgaggggatgtgaatttttttcactcctccatagtcatctggattccatttcaagttgtaatcaacccattgctgtttcagacgaacgttggttgtcacaatctgatttacttcatccacgttgataagctggatcagttgcagtcccacagtgacctgtacaatctcacggtggtcccctactggccggaccacactgctgtagtctttaaagagctttgccaccagacgagtctcatgttcggagcccagaacagtgccagcggagcagaggcccagcagcaggaggacagcggtgagctccatgggctgtggacgctggtgtggcctccagcagcctgtcccactccctggcactctggctgca

SEQ ID NO: 237 - RNA, 3037 nt, Macaca fascicularis
  source 1..3037: mol_type = mRNA
tttgttcgaatccactggaatgagaggatctgtcaggatgttgtcgtgggcttgaggtgagaggacctgtctcacctagttccatgtgggaaggaggcctggaaggacaggcaggatacttttaaataactgtctccttctgtgaacccacctcacgccctgcaaagaagcgcagctcgggtaacaatacttctcagactgagaaattactaactgctggttttcaggatgtttttcaagcaaaagaattgaaaagcggaaccactctgctctctgcttccctgagtgagagagtgggcagaggaacggatggaaggaggcagggacccggaacaactgctgatgcggtgggacactttttcccggtaattactcttcacttgaatcacagtgcacaggacgtgggcaatttgctccagctaatggttcgtgtgggataggtattgcctgatacagaggcaggggttggaacagccactctgggggccagtaaagtcagttttatggaagaagccgtctttgttaaaaaccaaacccaatcagcatgggggctctccagcagcggactcaacaccagctacactcttctgaaatccaggcagtcacaaaagccccccgcaccctcagcctaacactgaggcagaggaaatgaaactgaagccatgtttgcagaatgtggatttttgtggtttaggacaaacagctgactatctactcagaccaaatgtccctaatcaaatcaacccacagagacgaggttctggtttacacaaaagggaggcggtttgctcaccattcaaaataattccttcctttctatacattttttttttcattaagatctgactcctggtgcatttaaaatataacgcagttcatactcagcttgtcaagggtaagcaattgtgtaaagcgaggcacatttgtaatggtgtacagtgccagtaactccctgggctccagggctgagggcagcccagctgtcgctcccgcaaacaggtggtgtaaaacaatagctctagtgagccgacttgctttccaaaccctccagcagccaagcgcccagtcagagtgccagtgagaagtacaggccaccactctgccctggtccacaccagctccggtggcccatggagccctggcctctcctcctgctctttagcctttgctcagctggcctcgtcctgggctccgaacatgagacccgtctggtggcaaagctatttaaagactacagcagcgtggtgcggccagtggaagaccaccaccaggtcgtggaggtcaccgtgggcctgcagctgatacagctcatcaatgtggatgaagtaaatcagatcgtgacaaccaatgtgcgtctgaaacagcaatgggtggattacaacctaaaatggaatccagatgactatggcggtgtgaaaaaaattcacattccttcagaaaagatctggcgcccagactttgttctctataacaatgcagatggtgactttgctattgtcaagttcaccaaagtgctcctggaccacactggccacatcacatggacacctccagccatctttaaaagctactgtgagatcatcgtcacccacttcccctttgatgaacagaactgcagcatgaagctgggtacctggacctatgacggctctgtcgtggccatcaacccggaaagcgaccagccagacctgagcaacttcatggagagcggagagtgggtgatcaaggagtcccgaggctggaagcactgggtgttctattcctgctgccccaacaccccctacctggacatcacctaccacttcgtcatgcagcgcctgcccctctacttcatcgtcaatgtcatcatcccctgcctgctcttctccttcttaactggcctggtattctacctgcccacagactcaggggagaagatgactctgagcatctctgtcttactgtctttgactgtgttccttctggtcatcgtggagctgatcccctccacgtccagtgctgtacccttgattggaaaatacatgctgttcaccatggtgttcgtcattgcctccatcatcatcaccgtcatcgtcatcaacacacaccaccgctcacccagcacccatgtcatgcccgactgggtgcggaaggtttttatcgacactatcccaaatatcatgtttttctccacaatgaaaagaccatctagagaaaagcaagacaaaaagatttttacagaagacatcgatatctccgacatttctggaaagccagggcctccacccatgggcttccactctcccctgatcaaacaccccgaggtgaaaagtgccatcgagggcatcaagtacatcgcagagaccatgaagtcagaccaggagtctaacaatgcagcggaggagtggaagtacgttgcaatggtgatggaccacattctcctcggagtcttcatgctcgtctgcatcatcggaaccctagccgtgtttgcaggtcgactcattgaattaaatcagcaaggatgagcagaaagtgagctgagcctagctctgccccagaacctaccagagcaaagaagggcaggagaggaagatttgtctgcttgctacactcacacttatcaaacgtgtaatcttctgtacttactattgataagatttacctttatgtaagtttatagccttgaagtgttttcacattgcttctccctttagttctgctgtctccctgaagagtgaaccctctttagtaaatgaaactaatcactaaaaaagtgttcatttccagtgtctggaagagtttttcccaggataactgaggttttctgttgcattgtcattgctgttatatttatgtgtttacttattttgtctaaccacgagaccactagggagttgctgatgttctttttaaaatgtagtgtatcctttgcttaacagtcagttttgtacctactaataaaaccccatctaccagtcctaaagagataaggcatttgattcagagagagagggagcagtagaaatgaaataaactaaaatgcaaactgcatcaaaaa

SEQ ID NO: 238 - RNA, 3037 nt, Macaca fascicularis
  source 1..3037: mol_type = mRNA
tttttgatgcagtttgcattttagtttatttcatttctactgctccctctctctctgaatcaaatgccttatctctttaggactggtagatggggttttattagtaggtacaaaactgactgttaagcaaaggatacactacattttaaaaagaacatcagcaactccctagtggtctcgtggttagacaaaataagtaaacacataaatataacagcaatgacaatgcaacagaaaacctcagttatcctgggaaaaactcttccagacactggaaatgaacacttttttagtgattagtttcatttactaaagagggttcactcttcagggagacagcagaactaaagggagaagcaatgtgaaaacacttcaaggctataaacttacataaaggtaaatcttatcaatagtaagtacagaagattacacgtttgataagtgtgagtgtagcaagcagacaaatcttcctctcctgcccttctttgctctggtaggttctggggcagagctaggctcagctcactttctgctcatccttgctgatttaattcaatgagtcgacctgcaaacacggctagggttccgatgatgcagacgagcatgaagactccgaggagaatgtggtccatcaccattgcaacgtacttccactcctccgctgcattgttagactcctggtctgacttcatggtctctgcgatgtacttgatgccctcgatggcacttttcacctcggggtgtttgatcaggggagagtggaagcccatgggtggaggccctggctttccagaaatgtcggagatatcgatgtcttctgtaaaaatctttttgtcttgcttttctctagatggtcttttcattgtggagaaaaacatgatatttgggatagtgtcgataaaaaccttccgcacccagtcgggcatgacatgggtgctgggtgagcggtggtgtgtgttgatgacgatgacggtgatgatgatggaggcaatgacgaacaccatggtgaacagcatgtattttccaatcaagggtacagcactggacgtggaggggatcagctccacgatgaccagaaggaacacagtcaaagacagtaagacagagatgctcagagtcatcttctcccctgagtctgtgggcaggtagaataccaggccagttaagaaggagaagagcaggcaggggatgatgacattgacgatgaagtagaggggcaggcgctgcatgacgaagtggtaggtgatgtccaggtagggggtgttggggcagcaggaatagaacacccagtgcttccagcctcgggactccttgatcacccactctccgctctccatgaagttgctcaggtctggctggtcgctttccgggttgatggccacgacagagccgtcataggtccaggtacccagcttcatgctgcagttctgttcatcaaaggggaagtgggtgacgatgatctcacagtagcttttaaagatggctggaggtgtccatgtgatgtggccagtgtggtccaggagcactttggtgaacttgacaatagcaaagtcaccatctgcattgttatagagaacaaagtctgggcgccagatcttttctgaaggaatgtgaatttttttcacaccgccatagtcatctggattccattttaggttgtaatccacccattgctgtttcagacgcacattggttgtcacgatctgatttacttcatccacattgatgagctgtatcagctgcaggcccacggtgacctccacgacctggtggtggtcttccactggccgcaccacgctgctgtagtctttaaatagctttgccaccagacgggtctcatgttcggagcccaggacgaggccagctgagcaaaggctaaagagcaggaggagaggccagggctccatgggccaccggagctggtgtggaccagggcagagtggtggcctgtacttctcactggcactctgactgggcgcttggctgctggagggtttggaaagcaagtcggctcactagagctattgttttacaccacctgtttgcgggagcgacagctgggctgccctcagccctggagcccagggagttactggcactgtacaccattacaaatgtgcctcgctttacacaattgcttacccttgacaagctgagtatgaactgcgttatattttaaatgcaccaggagtcagatcttaatgaaaaaaaaaatgtatagaaaggaaggaattattttgaatggtgagcaaaccgcctcccttttgtgtaaaccagaacctcgtctctgtgggttgatttgattagggacatttggtctgagtagatagtcagctgtttgtcctaaaccacaaaaatccacattctgcaaacatggcttcagtttcatttcctctgcctcagtgttaggctgagggtgcggggggcttttgtgactgcctggatttcagaagagtgtagctggtgttgagtccgctgctggagagcccccatgctgattgggtttggtttttaacaaagacggcttcttccataaaactgactttactggcccccagagtggctgttccaacccctgcctctgtatcaggcaatacctatcccacacgaaccattagctggagcaaattgcccacgtcctgtgcactgtgattcaagtgaagagtaattaccgggaaaaagtgtcccaccgcatcagcagttgttccgggtccctgcctccttccatccgttcctctgcccactctctcactcagggaagcagagagcagagtggttccgcttttcaattcttttgcttgaaaaacatcctgaaaaccagcagttagtaatttctcagtctgagaagtattgttacccgagctgcgcttctttgcagggcgtgaggtgggttcacagaaggagacagttatttaaaagtatcctgcctgtccttccaggcctccttcccacatggaactaggtgagacaggtcctctcacctcaagcccacgacaacatcctgacagatcctctcattccagtggattcgaacaaa

SEQ ID NO: 239 - RNA, 1988 nt, Macaca mulatta
  source 1..1988: mol_type = mRNA
cagccaagcgcccagtcagagtgccagtgagaagtacaggccaccactctgccctggtccacaccagctccggtggcccatggagccctggcctctcctcctgctctttagcctttgctcagctggcctcgtcctgggctccgaacatgagacccgtctggtggcaaagctatttaaagactacagcagcgtggtgcggccagtggaagaccaccaccaggtcgtggaggtcaccgtgggcctgcagctgatacagctcatcaatgtggatgaagtaaatcagatcgtgacaaccaatgtgcgtctgaaacagcaatgggtagattgcaacctaaaatggaatccagatgactatggcggtgtgaaaaaaattcacattccttcagaaaagatctggcgcccagactttgttctctataacaatgcagatggtgactttgctattgtcaagttcaccaaagtgctcctggaccacactggccacatcacatggacacctccagccatctttaaaagctactgtgagatcatcgtcacccacttcccctttgatgaacagaactgcagcatgaagctgggtacctggacctatgacggctctgtcgtggccatcaacccggaaagcgaccagccagatctgagcaacttcatggagagcggagagtgggtgatcaaggagtcccgaggctggaagcactgggtgttctattcctgctgccccaacaccccctacctggacatcacctaccacttcgtcatgcagcgcctgcccctctacttcatcgtgaatgtcatcatcccctgcctgctcttctccttcttaactggcctggtattctacctgcccacagactcaggggagaagatgactctgagcatctctgtcttactgtctttgactgtgttccttctggtcatcgtggagctgatcccctccacgtccagtgctgtacccttgattggaaaatacatgctgttcaccatggtgttcgttattgcctccatcatcatcaccgtcatcgtcatcaacacacaccaccgctcacccagcacccatgtcatgcccgactgggtgcggaaggtttttatcgacactatcccaaatatcatgtttttctccacaatgaaaagaccatctagagaaaagcaagacaaaaagatttttacagaagacatcgatatctccgacatttctggaaagccagggcctccacccatgggcttccactctcccctgatcaaacaccccgaggtgaaaagtgccatcgagggcatcaagtacatcgcagagaccatgaagtcagaccaggagtctaacaatgcagcggaggagtggaagtacgttgcaatggtgatggaccacattctcctcggagtcttcatgctcgtctgcatcatcggaaccctagccgtgtttgcaggtcgactcattgaattaaatcagcaaggatgagcagaaagtgagctgagcctagctctgccccagaacctaccagagcaaagaagggcaggagaggaagatttgtctgcttgctacactcgcacttatcaaacgtgtaatcttctgtacttattattgataagatttacctttatgtaagtttataaccttgaagtgttttcacattgcttctccctttagttctgctgtctccctgaagagtgaaccctctttagtaaatgaaactaaccactaaaaaagtgttcatttccagtgtctggaagagtttttcccaggataactgaggttttctgttgcattgtcattgctgttatatttatgtgtttacttattttgtctaaccacgagaccactagggagttgctgatgttctttttaaaatgtagtgtatcctttgcttaacagtcagttttgtacctactaataaaaccccatctaccagtcctaaagagataaggcatttgattcagagagagagggagcagtagaaatgaaataaactaaaatgcaaactgcatcaaaaatc

SEQ ID NO: 240 - RNA, 1988 nt, Macaca mulatta
  source 1..1988: mol_type = mRNA
gatttttgatgcagtttgcattttagtttatttcatttctactgctccctctctctctgaatcaaatgccttatctctttaggactggtagatggggttttattagtaggtacaaaactgactgttaagcaaaggatacactacattttaaaaagaacatcagcaactccctagtggtctcgtggttagacaaaataagtaaacacataaatataacagcaatgacaatgcaacagaaaacctcagttatcctgggaaaaactcttccagacactggaaatgaacacttttttagtggttagtttcatttactaaagagggttcactcttcagggagacagcagaactaaagggagaagcaatgtgaaaacacttcaaggttataaacttacataaaggtaaatcttatcaataataagtacagaagattacacgtttgataagtgcgagtgtagcaagcagacaaatcttcctctcctgcccttctttgctctggtaggttctggggcagagctaggctcagctcactttctgctcatccttgctgatttaattcaatgagtcgacctgcaaacacggctagggttccgatgatgcagacgagcatgaagactccgaggagaatgtggtccatcaccattgcaacgtacttccactcctccgctgcattgttagactcctggtctgacttcatggtctctgcgatgtacttgatgccctcgatggcacttttcacctcggggtgtttgatcaggggagagtggaagcccatgggtggaggccctggctttccagaaatgtcggagatatcgatgtcttctgtaaaaatctttttgtcttgcttttctctagatggtcttttcattgtggagaaaaacatgatatttgggatagtgtcgataaaaaccttccgcacccagtcgggcatgacatgggtgctgggtgagcggtggtgtgtgttgatgacgatgacggtgatgatgatggaggcaataacgaacaccatggtgaacagcatgtattttccaatcaagggtacagcactggacgtggaggggatcagctccacgatgaccagaaggaacacagtcaaagacagtaagacagagatgctcagagtcatcttctcccctgagtctgtgggcaggtagaataccaggccagttaagaaggagaagagcaggcaggggatgatgacattcacgatgaagtagaggggcaggcgctgcatgacgaagtggtaggtgatgtccaggtagggggtgttggggcagcaggaatagaacacccagtgcttccagcctcgggactccttgatcacccactctccgctctccatgaagttgctcagatctggctggtcgctttccgggttgatggccacgacagagccgtcataggtccaggtacccagcttcatgctgcagttctgttcatcaaaggggaagtgggtgacgatgatctcacagtagcttttaaagatggctggaggtgtccatgtgatgtggccagtgtggtccaggagcactttggtgaacttgacaatagcaaagtcaccatctgcattgttatagagaacaaagtctgggcgccagatcttttctgaaggaatgtgaatttttttcacaccgccatagtcatctggattccattttaggttgcaatctacccattgctgtttcagacgcacattggttgtcacgatctgatttacttcatccacattgatgagctgtatcagctgcaggcccacggtgacctccacgacctggtggtggtcttccactggccgcaccacgctgctgtagtctttaaatagctttgccaccagacgggtctcatgttcggagcccaggacgaggccagctgagcaaaggctaaagagcaggaggagaggccagggctccatgggccaccggagctggtgtggaccagggcagagtggtggcctgtacttctcactggcactctgactgggcgcttggctg

SEQ ID NO: 241 - RNA, 2560 nt, Homo sapiens
  source 1..2560: mol_type = mRNA
gtcacttcccctgtgctggcggtcccagcggctctctgagcgaagtcactgagcgagccgccaggctatgaccccaggggctctgctgatgctgctgggggcgctgggggcgccgctcgccccaggcgtccgcggctcggaggcggagggtcgactccgggagaaacttttctctggctatgatagctccgtgcggccagcgcgggaggtgggagaccgtgtcagggtcagcgttggtctcatcctggcgcaactcatcagcctgaacgagaaggatgaagagatgagcacaaaggtgtacttagacctggagtggactgactacaggctgagctgggaccctgcggagcacgacggcatcgattcgctccgcatcacggcggaatccgtgtggctccctgacgtggtgctactgaacaacaatgatgggaattttgacgtggctctggacattagcgtcgtggtgtcctccgacggctccgtgcgttggcaacccccgggcatctatcgcagcagctgcagcatccaggtcacctacttccccttcgactggcagaattgcactatggtgttcagctcctacagctacgacagctcggaggtcagcctgcagacaggcctgggtcctgacgggcaagggcatcaggaaatccacattcatgaagggactttcattgagaatggccagtgggagattatccacaagccctctcggctaatccagcctccaggcgatcctaggggagggagggaaggacagcgccaggaagtcatcttctacctcatcatccgccgcaagcctctcttctacctggtcaacgtcattgccccatgcatcctcatcactcttctggccatcttcgtcttctacctgccaccagatgcaggagagaagatggggctctcaatctttgccctgctgacccttactgtgttcctgctgctgctggctgacaaagtacctgagacctcactatcagtacccattattatcaagtacctcatgtttaccatggtcctcgtcaccttctcagtcatccttagtgtcgtggttctcaacctgcaccaccgctcaccccacacccaccaaatgcccctttgggtccgtcagatcttcattcacaaacttccgctgtacctgcgtctaaaaaggcccaaacccgagagagacctgatgccggagccccctcactgttcttctccaggaagtggctggggtcggggaacagatgaatatttcatccggaagccgccaagtgattttctcttccccaaacccaataggttccagcctgaactgtctgcccctgatctgcggcgatttatcgatggtccaaaccgggctgtggccctgcttccggagctacgggaggtcgtctcctctatcagctacatcgctcgacagctgcaggaacaggaggaccacgatgcgctgaaggaggactggcagtttgtggccatggtagtggaccgcctcttcctgtggactttcatcatcttcaccagcgttgggaccctagtcatcttcctggacgccacgtaccacttgccccctccagacccctttccttgaagactggagggttgagacccaggccccctgccagttgaagtgagagtttggtgatactgtcaagccctatccttctctgcctcttaactccttcacgaggaatctgggcctcttatttcgtttctggggactgcattggactgagggctgggtaggcaggtgtcttggacccacctgaaatgcagtatcatctgatttactctttgggatcttgaagaagctcttttgggtatcaacacctaggtcgccagtgaaatagaacacagaacaggaactagattataagccttatgaggtcaagaaatgtgacttggccgggcgcggtggctcacgcctgtaatcccagcactttgggaggccaaggcgggcggatcacctgaggtcgggagtttgagaccagcccgaccaacatggagaaaccctgtctctactaaaaatacaaaattagccaggtgtggtggtacatgcctgtaatcccagctactagggaggctgaggcaggagaatcactcgaacccgggaggcagaggttgcagtgagtcaagatcacgccattgcactccagcctgggcaacaagagcgaaactccatctcaaaaaaaaaaaagtgtcttgttcactgcagcatgcccagtgccacgcacaggtgctgacctatagtaagtgcttaacatttgttgaataggggaaagaaatttccggaagtaaatacagcaattaataatgtttataagctgggcatggtcgctcaggccagtaatcccagtgacttaggaggctgaggtgggaggattacttgaaacccacagtttgagaccagcctgggcaacatagtgagaccctgtctctaaaaaaataaaaatagaaataaagtagtgcttattgtttgcatgttgggtcttgtggtcgttttctttttacctttctgtaatttattatgttttgtaatgtgtactatctctgggattaaaaaaagttatttctacaa

SEQ ID NO: 242 - RNA, 2560 nt, Homo sapiens
  source 1..2560: mol_type = mRNA
ttgtagaaataactttttttaatcccagagatagtacacattacaaaacataataaattacagaaaggtaaaaagaaaacgaccacaagacccaacatgcaaacaataagcactactttatttctatttttatttttttagagacagggtctcactatgttgcccaggctggtctcaaactgtgggtttcaagtaatcctcccacctcagcctcctaagtcactgggattactggcctgagcgaccatgcccagcttataaacattattaattgctgtatttacttccggaaatttctttcccctattcaacaaatgttaagcacttactataggtcagcacctgtgcgtggcactgggcatgctgcagtgaacaagacacttttttttttttgagatggagtttcgctcttgttgcccaggctggagtgcaatggcgtgatcttgactcactgcaacctctgcctcccgggttcgagtgattctcctgcctcagcctccctagtagctgggattacaggcatgtaccaccacacctggctaattttgtatttttagtagagacagggtttctccatgttggtcgggctggtctcaaactcccgacctcaggtgatccgcccgccttggcctcccaaagtgctgggattacaggcgtgagccaccgcgcccggccaagtcacatttcttgacctcataaggcttataatctagttcctgttctgtgttctatttcactggcgacctaggtgttgatacccaaaagagcttcttcaagatcccaaagagtaaatcagatgatactgcatttcaggtgggtccaagacacctgcctacccagccctcagtccaatgcagtccccagaaacgaaataagaggcccagattcctcgtgaaggagttaagaggcagagaaggatagggcttgacagtatcaccaaactctcacttcaactggcagggggcctgggtctcaaccctccagtcttcaaggaaaggggtctggagggggcaagtggtacgtggcgtccaggaagatgactagggtcccaacgctggtgaagatgatgaaagtccacaggaagaggcggtccactaccatggccacaaactgccagtcctccttcagcgcatcgtggtcctcctgttcctgcagctgtcgagcgatgtagctgatagaggagacgacctcccgtagctccggaagcagggccacagcccggtttggaccatcgataaatcgccgcagatcaggggcagacagttcaggctggaacctattgggtttggggaagagaaaatcacttggcggcttccggatgaaatattcatctgttccccgaccccagccacttcctggagaagaacagtgagggggctccggcatcaggtctctctcgggtttgggcctttttagacgcaggtacagcggaagtttgtgaatgaagatctgacggacccaaaggggcatttggtgggtgtggggtgagcggtggtgcaggttgagaaccacgacactaaggatgactgagaaggtgacgaggaccatggtaaacatgaggtacttgataataatgggtactgatagtgaggtctcaggtactttgtcagccagcagcagcaggaacacagtaagggtcagcagggcaaagattgagagccccatcttctctcctgcatctggtggcaggtagaagacgaagatggccagaagagtgatgaggatgcatggggcaatgacgttgaccaggtagaagagaggcttgcggcggatgatgaggtagaagatgacttcctggcgctgtccttccctccctcccctaggatcgcctggaggctggattagccgagagggcttgtggataatctcccactggccattctcaatgaaagtcccttcatgaatgtggatttcctgatgcccttgcccgtcaggacccaggcctgtctgcaggctgacctccgagctgtcgtagctgtaggagctgaacaccatagtgcaattctgccagtcgaaggggaagtaggtgacctggatgctgcagctgctgcgatagatgcccgggggttgccaacgcacggagccgtcggaggacaccacgacgctaatgtccagagccacgtcaaaattcccatcattgttgttcagtagcaccacgtcagggagccacacggattccgccgtgatgcggagcgaatcgatgccgtcgtgctccgcagggtcccagctcagcctgtagtcagtccactccaggtctaagtacacctttgtgctcatctcttcatccttctcgttcaggctgatgagttgcgccaggatgagaccaacgctgaccctgacacggtctcccacctcccgcgctggccgcacggagctatcatagccagagaaaagtttctcccggagtcgaccctccgcctccgagccgcggacgcctggggcgagcggcgcccccagcgcccccagcagcatcagcagagcccctggggtcatagcctggcggctcgctcagtgacttcgctcagagagccgctgggaccgccagcacaggggaagtgac

SEQ ID NO: 243 - RNA, 2151 nt, Mus musculus
  source 1..2151: mol_type = mRNA
ttcccctggcctgaggccgctatccggacaaacttcactgagcgaaagaggcagggccatggccttaggggcgctgcttctgcttctaggggtactcgggacgcccctcgccccaggcgcccgcgggtcggaagccgaaggccaactgattaagaaacttttctccaactatgatagctcggtgaggccggcgcgggaggtgggagaccgcgtcggggtcagcatcggcctcaccctggcgcaactcatcagcctgaacgagaaggatgaagaaatgagcacaaaggtgtacttagacctggagtggaccgactacaggttaagctgggaccccgcagaacatgatggcatcgattctctccgcatcactgctgaatccgtttggctccctgatgtggtgctgctgaacaacaatgacggaaatttcgacgttgccctggacatcaatgttgtggtatctttcgagggctctgtgcgctggcaaccccctggcctgtaccgcagcagctgcagcatccaggtcacctacttcccctttgactggcagaactgcaccatggtgtttagttcctacagctatgacagctctgaggtcagcctgaagacgggcctggatcctgaaggagaggagaggcaggaagtctacattcatgaagggaccttcattgagaatggccaatgggagattatccacaaaccttctaggttaatccaacttccaggggatcagagaggtgggaaggaagggcatcatgaggaagttatcttctatctcattattcggcggaagcctctcttctacctggtcaacgtcattgccccatgcatcctcatcacgctcctggccatctttgtcttctacctcccaccagatgcaggagagaagatggggctctccatctttgccctgctgacgctcactgtgttcttgctgctgttggccgacaaagtgcctgagacctccctggcggtgcccatcattatcaagtacctcatgtttaccatggtccttgtcaccttctccgttatccttagtgttgtggtcctcaacctgcatcatcgctcaccccacacccaccaaatgcccttttgggtccgccagatcttcattcacaagctccctccatacctgggtctgaagaggcccaaacccgagagagaccaactccctgaaccacatcactctctttctccaagaagtggctggggcagaggaactgatgaatatttcatccggaagcctccaagtgattttcttttccctaaacttaacaggtttcagcctgaatcatctgccccggacctgcgacgatttatcgatggtccaacccgggctgtaggtctgcctcaggagctacgagaggtcatttcctcaatcagctacatggcccgacagcttcaggaacaggaggaccacgacgcactgaaggaggactggcagtttgtggccatggttgtggaccgtctttttctgtggacattcatcgttttcacaagcgtcgggaccctagtcattttcctagatgccacgtaccatttgccccctcctgaacctttcccttgaggaccctccggtcatttttgccaaatgctgcaggtactctcaagctcaatagcgcttggcgcttgtaagaatcttgtttctgggaagacgttcaagtgagacttggaggctgagcatggtgccttggacccacccgaaatgtccttctacttattatttagagttttgttcttctgcggttttgtttttgttgtttttgagacagagtctcactctgtggcccaggctagcctggaactgtggcgtccaggctggtctcaaactcccaacaatgttacttccttagcctagcaattgttggaatcacagacctggtaaaccagcacacttggagtttgtttcttgaaactacatagaatgtcacagcttagatctctagtgaaatagaattataaccaagtagtagactgtaagccttttgaggacaggagatctgttggctactgaattatccccagcaatgtgtacaggtcctagcccataagtgcttaacatttgttgaagagagggaaaataaatctggaaggaaatataaatatcgcctacaattgcacgtattaaaattaaaatgtagaaaatgattaaaa

SEQ ID NO: 244 - RNA, 2151 nt, Mus musculus
  source 1..2151: mol_type = mRNA
ttttaatcattttctacattttaattttaatacgtgcaattgtaggcgatatttatatttccttccagatttattttccctctcttcaacaaatgttaagcacttatgggctaggacctgtacacattgctggggataattcagtagccaacagatctcctgtcctcaaaaggcttacagtctactacttggttataattctatttcactagagatctaagctgtgacattctatgtagtttcaagaaacaaactccaagtgtgctggtttaccaggtctgtgattccaacaattgctaggctaaggaagtaacattgttgggagtttgagaccagcctggacgccacagttccaggctagcctgggccacagagtgagactctgtctcaaaaacaacaaaaacaaaaccgcagaagaacaaaactctaaataataagtagaaggacatttcgggtgggtccaaggcaccatgctcagcctccaagtctcacttgaacgtcttcccagaaacaagattcttacaagcgccaagcgctattgagcttgagagtacctgcagcatttggcaaaaatgaccggagggtcctcaagggaaaggttcaggagggggcaaatggtacgtggcatctaggaaaatgactagggtcccgacgcttgtgaaaacgatgaatgtccacagaaaaagacggtccacaaccatggccacaaactgccagtcctccttcagtgcgtcgtggtcctcctgttcctgaagctgtcgggccatgtagctgattgaggaaatgacctctcgtagctcctgaggcagacctacagcccgggttggaccatcgataaatcgtcgcaggtccggggcagatgattcaggctgaaacctgttaagtttagggaaaagaaaatcacttggaggcttccggatgaaatattcatcagttcctctgccccagccacttcttggagaaagagagtgatgtggttcagggagttggtctctctcgggtttgggcctcttcagacccaggtatggagggagcttgtgaatgaagatctggcggacccaaaagggcatttggtgggtgtggggtgagcgatgatgcaggttgaggaccacaacactaaggataacggagaaggtgacaaggaccatggtaaacatgaggtacttgataatgatgggcaccgccagggaggtctcaggcactttgtcggccaacagcagcaagaacacagtgagcgtcagcagggcaaagatggagagccccatcttctctcctgcatctggtgggaggtagaagacaaagatggccaggagcgtgatgaggatgcatggggcaatgacgttgaccaggtagaagagaggcttccgccgaataatgagatagaagataacttcctcatgatgcccttccttcccacctctctgatcccctggaagttggattaacctagaaggtttgtggataatctcccattggccattctcaatgaaggtcccttcatgaatgtagacttcctgcctctcctctccttcaggatccaggcccgtcttcaggctgacctcagagctgtcatagctgtaggaactaaacaccatggtgcagttctgccagtcaaaggggaagtaggtgacctggatgctgcagctgctgcggtacaggccagggggttgccagcgcacagagccctcgaaagataccacaacattgatgtccagggcaacgtcgaaatttccgtcattgttgttcagcagcaccacatcagggagccaaacggattcagcagtgatgcggagagaatcgatgccatcatgttctgcggggtcccagcttaacctgtagtcggtccactccaggtctaagtacacctttgtgctcatttcttcatccttctcgttcaggctgatgagttgcgccagggtgaggccgatgctgaccccgacgcggtctcccacctcccgcgccggcctcaccgagctatcatagttggagaaaagtttcttaatcagttggccttcggcttccgacccgcgggcgcctggggcgaggggcgtcccgagtacccctagaagcagaagcagcgcccctaaggccatggccctgcctctttcgctcagtgaagtttgtccggatagcggcctcaggccaggggaa

SEQ ID NO: 245 - RNA, 2299 nt, Rattus norvegicus
  source 1..2299: mol_type = mRNA
cgtcacttcccctggcctggcggcctcggccgctcttcggacaaacccactgagcgaaatcggcagggccatggccttaggggcgctgcttctgattctggggatactcgggacgcccctcgccccaggagcccgcgggtcggaagccgaaggccaactgcttaagaaacttttctcggattatgatagctcagtaaggccggcgcaggaggtgggagaccgcgtcggggtcagcatcggcctcaccctggcgcaactcatcagcctggtgagagagaacgagaaggatgaagaaatgagcacaaaggtgtacttagacctggagtggaccgactacaggttaagctgggaccccgcagaacacgatggcatcgagtctctccgtgtcactgctgaatctgtttggctcccggacgtggtgctgctgaacaacaatgatggaaactttgacgttgccctggacattaatgtcgtggtgtcctttgagggctctgtgcgctggcaaccccctggcctgtatcgcagcagctgcagcatccaggtcacctacttcccctttgactggcagaattgcaccatggtgtttagttcctacagctatgacagctctgaggtcagcctgaagacaggcccagatcctgatggacaggagaggcaggaaatctacatccatgaagggaccttcatcgagaatggtcaatgggagattatccacaaaccctctaggttaatccaccttccaggggatcgaagaggagggaaggaaggacatcgtgaggaagttatcttctatctcattattcggaggaagcctctcttctacctggtcaatgtcattgccccgtgcatcctcatcaccctcctggccatctttgttttctaccttccaccagatgcaggagagaagatggggctctccatctttgccctgctgaccctcactgtgttcttgctgctgctggccgacaaagtgcctgagacctccctggcggtccccatcatcatcaagtatctcatgtttaccatgatccttgtcaccttctcagttatccttagcgttgtggtcctcaacttgcaccatcgctcaccccacacccaccaaatgcccttttgggtccgccagatcttcattcacaagctccctccatacctgggtctgaagaggcccaaacccgagagagaccaactacccgaaccacatcactccttctccccaaggagtggctggggccgaggaactgatgaatatttcatacggaagcctccatgtgattttcttttccctaaacttaacaggtttcagcctgaatcacctgctccggacctgagacgatttatcgatggtccaccccgggctgtaggtctgcctcaggagctacgcgaggtcatttcttccatcagctacatggcccgacaacttcaggaacaggaggaccacgatgcactgaaggaggactggcagtttgtcgccatggttgtggaccgtctttttctgtggacattcatcgttttcacaagcgtcgggacgctagtcattttcctagatgccacgtaccatttgccccctcctgaaccttttccttgaggaccctccggtcatttttgccaagtgctgcaggtactctcacgctgtatagcgcttggctcctgtaagaatcttgttcttgtttctgggaagacgttgaagtgggacttggggggtgagcagggtgccttggacttcaacaaatgtccttcaacccattagttttgttcttctgcagctttgtttttgttggttttttttttgttgttgttgtttttgccccccccccccccccgggctggggagcgaacccaggatcttgcgcttcctaggtagaagcgctctaccactgagccaaatccccaaccccgtttttgttgtttttgagacagagtctcactctgtgtcccaggctagcctggaactatgaagtccaggctggcctcaaactcccagcagtgttacttccttagcttaccaaatgttggaatggcaggtctggtaagccagcgcacttggattttgtttcttgaaactacacagaatgtcacaacttagatatctagtgaaagagaattataagcaactagtagcttgaaagcctttggaggacaggaaatctgttggctactgtaacgtccccagcaatgcgcacaggtcctaccccataagtgcttaacatttgttgaagagggaaaaaaatccggaaggaaatacaaaataatactgcctacaattgcatgtattgaaattaaaatgtagagaaatgattga

SEQ ID NO: 246 - RNA, 2299 nt, Rattus norvegicus
  source 1..2299: mol_type = mRNA
tcaatcatttctctacattttaatttcaatacatgcaattgtaggcagtattattttgtatttccttccggatttttttccctcttcaacaaatgttaagcacttatggggtaggacctgtgcgcattgctggggacgttacagtagccaacagatttcctgtcctccaaaggctttcaagctactagttgcttataattctctttcactagatatctaagttgtgacattctgtgtagtttcaagaaacaaaatccaagtgcgctggcttaccagacctgccattccaacatttggtaagctaaggaagtaacactgctgggagtttgaggccagcctggacttcatagttccaggctagcctgggacacagagtgagactctgtctcaaaaacaacaaaaacggggttggggatttggctcagtggtagagcgcttctacctaggaagcgcaagatcctgggttcgctccccagcccggggggggggggggggcaaaaacaacaacaacaaaaaaaaaaccaacaaaaacaaagctgcagaagaacaaaactaatgggttgaaggacatttgttgaagtccaaggcaccctgctcaccccccaagtcccacttcaacgtcttcccagaaacaagaacaagattcttacaggagccaagcgctatacagcgtgagagtacctgcagcacttggcaaaaatgaccggagggtcctcaaggaaaaggttcaggagggggcaaatggtacgtggcatctaggaaaatgactagcgtcccgacgcttgtgaaaacgatgaatgtccacagaaaaagacggtccacaaccatggcgacaaactgccagtcctccttcagtgcatcgtggtcctcctgttcctgaagttgtcgggccatgtagctgatggaagaaatgacctcgcgtagctcctgaggcagacctacagcccggggtggaccatcgataaatcgtctcaggtccggagcaggtgattcaggctgaaacctgttaagtttagggaaaagaaaatcacatggaggcttccgtatgaaatattcatcagttcctcggccccagccactccttggggagaaggagtgatgtggttcgggtagttggtctctctcgggtttgggcctcttcagacccaggtatggagggagcttgtgaatgaagatctggcggacccaaaagggcatttggtgggtgtggggtgagcgatggtgcaagttgaggaccacaacgctaaggataactgagaaggtgacaaggatcatggtaaacatgagatacttgatgatgatggggaccgccagggaggtctcaggcactttgtcggccagcagcagcaagaacacagtgagggtcagcagggcaaagatggagagccccatcttctctcctgcatctggtggaaggtagaaaacaaagatggccaggagggtgatgaggatgcacggggcaatgacattgaccaggtagaagagaggcttcctccgaataatgagatagaagataacttcctcacgatgtccttccttccctcctcttcgatcccctggaaggtggattaacctagagggtttgtggataatctcccattgaccattctcgatgaaggtcccttcatggatgtagatttcctgcctctcctgtccatcaggatctgggcctgtcttcaggctgacctcagagctgtcatagctgtaggaactaaacaccatggtgcaattctgccagtcaaaggggaagtaggtgacctggatgctgcagctgctgcgatacaggccagggggttgccagcgcacagagccctcaaaggacaccacgacattaatgtccagggcaacgtcaaagtttccatcattgttgttcagcagcaccacgtccgggagccaaacagattcagcagtgacacggagagactcgatgccatcgtgttctgcggggtcccagcttaacctgtagtcggtccactccaggtctaagtacacctttgtgctcatttcttcatccttctcgttctctctcaccaggctgatgagttgcgccagggtgaggccgatgctgaccccgacgcggtctcccacctcctgcgccggccttactgagctatcataatccgagaaaagtttcttaagcagttggccttcggcttccgacccgcgggctcctggggcgaggggcgtcccgagtatccccagaatcagaagcagcgcccctaaggccatggccctgccgatttcgctcagtgggtttgtccgaagagcggccgaggccgccaggccaggggaagtgacg

SEQ ID NO: 247 - RNA, 2175 nt, Macaca fascicularis
  source 1..2175: mol_type = mRNA
gtcacttcccctgtgctggcggtcccagtggctctcggagcgaagtcactgagcgagccgccaggctatgaccccaggggctctgctgatgctgctgggggcgctgggagcgccgctcgccccaggcgtccgcggctcggaggcagagggccgactccgggagaaacttttctctggctatgatagctccgtgcggccagcgcgggaggtgggagaccgtgtcagggtcagcgttggtctcatcctggcacaactcatcagcctgaacgagaaggatgaagagatgagcacaaaagtgtacttagacctggagtggactgactacaggctgagctgggaccctgcggagcacgacggcatcgatttgctccgcatcacggcggaatccgtgtggctccctgacgtggtgctactgaacaaatcccttctctgcagcaatgatgggaattttgacgtggctctggacattaacgtcgtggcgtcctccgacggctccgtgcgttggcaacccccgggcatctatcgcagcagctgcagcatccaggtcacctacttccccttcgactggcagaactgtactatggtgttcagttcctacagctacgacagctccgaggtcagcctgcagacaggcctgggtcctgacgggcaagagcagcaggaaatccacattcatgaagggactttcattgagaatggccagtgggagattatccacaagccctctcggctaatccagcctccaggtgatcctagggaagggagggaaggacagcgccaggaagtcgtcttctacctcatcatccgccggaagcctctcttctacctggtcaacgtcatcgccccatgcatcctcatcactcttctggccatcttcgtcttctacctgccaccagatgcaggagagaagatggggctctcaatctttgccctgctgacccttactgtgttcctgctgctactggccgacaaagtacctgagacctccctatcggtacccattattatcaagtacctcatgtttaccatggtcctcgtcaccttctcagtcatccttagtgtcgtggttctcaacctgcaccaccgctcaccccacacccaccaaatgcccctttgggtccgtcagatcttcattcacaaactgccgccgtacctgggtttaaaaaggcccaagcccgagagagaactgatgccggagccccctcactgttcttctccaggaagtggctggggtcggggaacagatgaatatttcatccggaagccgccaagtgattttctcttccccaaacccaacaggttccagcctgaactgtctgcccctgatctgcggcgatttatcgatggtccaaaccgggctgtggccctgcctccggagttacgggaggtcgtctcctctatcagctacatcgctcgacagctgcaggaacaggaggaccacgatgcgctgaaggaggactggcagtttgtggccatggtagtggaccgcctcttcctgtggactttcatcatcttcaccagcgttggaaccctagtcattttcctggacgccacgtaccacttgccccctccagacccctttccttgaagactggagggtcgagacccaggccctctaccagttgaagtgagagtttggtgatactgtcaagccatatccttctctgcctcttaactccttcactaggaatccgggcctcttatttcgtttctggggactgcattggactgagggctgggtaggcaggtgtcttggacccacctgaaatgcactatcatctgatttcctctttgggatcttgaagaagctcttttgggtatcaacacctaggttgccagtgaaatagaacaaagaacaggaactagattgtaagccttatgaggtcaagaaatgtgtcttgttcactgtaacatccccagtgccatgcacaggtcctgacctatagtaagtgcttaacatttgttgaataggggaaataaatttctggaagtaaatacagcaattaataatgtttataagctgggcatggtcgctcaggccagtaatcccagtgacttgggaggctgaggtgggaggattacttgaaccccacagtttgagaccagcctgggcaacatagtgagactctgtctctaaaaaaataaaaatagaaataaagtagcttattgtttgca

SEQ ID NO: 248 - RNA, 2175 nt, Macaca fascicularis
  source 1..2175: mol_type = mRNA
tgcaaacaataagctactttatttctatttttatttttttagagacagagtctcactatgttgcccaggctggtctcaaactgtggggttcaagtaatcctcccacctcagcctcccaagtcactgggattactggcctgagcgaccatgcccagcttataaacattattaattgctgtatttacttccagaaatttatttcccctattcaacaaatgttaagcacttactataggtcaggacctgtgcatggcactggggatgttacagtgaacaagacacatttcttgacctcataaggcttacaatctagttcctgttctttgttctatttcactggcaacctaggtgttgatacccaaaagagcttcttcaagatcccaaagaggaaatcagatgatagtgcatttcaggtgggtccaagacacctgcctacccagccctcagtccaatgcagtccccagaaacgaaataagaggcccggattcctagtgaaggagttaagaggcagagaaggatatggcttgacagtatcaccaaactctcacttcaactggtagagggcctgggtctcgaccctccagtcttcaaggaaaggggtctggagggggcaagtggtacgtggcgtccaggaaaatgactagggttccaacgctggtgaagatgatgaaagtccacaggaagaggcggtccactaccatggccacaaactgccagtcctccttcagcgcatcgtggtcctcctgttcctgcagctgtcgagcgatgtagctgatagaggagacgacctcccgtaactccggaggcagggccacagcccggtttggaccatcgataaatcgccgcagatcaggggcagacagttcaggctggaacctgttgggtttggggaagagaaaatcacttggcggcttccggatgaaatattcatctgttccccgaccccagccacttcctggagaagaacagtgagggggctccggcatcagttctctctcgggcttgggcctttttaaacccaggtacggcggcagtttgtgaatgaagatctgacggacccaaaggggcatttggtgggtgtggggtgagcggtggtgcaggttgagaaccacgacactaaggatgactgagaaggtgacgaggaccatggtaaacatgaggtacttgataataatgggtaccgatagggaggtctcaggtactttgtcggccagtagcagcaggaacacagtaagggtcagcagggcaaagattgagagccccatcttctctcctgcatctggtggcaggtagaagacgaagatggccagaagagtgatgaggatgcatggggcgatgacgttgaccaggtagaagagaggcttccggcggatgatgaggtagaagacgacttcctggcgctgtccttccctcccttccctaggatcacctggaggctggattagccgagagggcttgtggataatctcccactggccattctcaatgaaagtcccttcatgaatgtggatttcctgctgctcttgcccgtcaggacccaggcctgtctgcaggctgacctcggagctgtcgtagctgtaggaactgaacaccatagtacagttctgccagtcgaaggggaagtaggtgacctggatgctgcagctgctgcgatagatgcccgggggttgccaacgcacggagccgtcggaggacgccacgacgttaatgtccagagccacgtcaaaattcccatcattgctgcagagaagggatttgttcagtagcaccacgtcagggagccacacggattccgccgtgatgcggagcaaatcgatgccgtcgtgctccgcagggtcccagctcagcctgtagtcagtccactccaggtctaagtacacttttgtgctcatctcttcatccttctcgttcaggctgatgagttgtgccaggatgagaccaacgctgaccctgacacggtctcccacctcccgcgctggccgcacggagctatcatagccagagaaaagtttctcccggagtcggccctctgcctccgagccgcggacgcctggggcgagcggcgctcccagcgcccccagcagcatcagcagagcccctggggtcatagcctggcggctcgctcagtgacttcgctccgagagccactgggaccgccagcacaggggaagtgac

SEQ ID NO: 249 - RNA, 2160 nt, Macaca mulatta
  source 1..2160: mol_type = mRNA
ttcccctgtgctggcggtcccagtggctctcggagcgaagtcactgagcgagccgccaggctatgaccccaggggctctgctgatgctgctgggggcgctgggagcgccgctcaccccaggcgtccgcggctcggaggcagagggccgactccgggagaaacttttctctggctatgatagctccgtgcggccagcgcgggaggtgggagaccgtgtcagggtcagcgttggtctcatcctggcacaactcatcagcctgaacgagaaggatgaagagatgagcacaaaagtgtacttagacctggagtggactgactacaggctgagctgggaccctgcgcagcacgacggcatcgatttgctccgcatcacggcggaatccgtgtggctccctgacgtggtgctactgaacaacaatgatgggaattttgacgtggctctggacattaacgtcgtggcgtcctccgacggctccgtgcgttggcaacccccgggcatctatcgcagcagctgcagcatccaggtcacctacttccccttcgactggcagaactgtactatggtgttcagttcctacacctacgacagctcggaggtcagcctgcagacaggcctgggtcctgacgggcaagagcagcaggaaatccacattcatgaagggactttcattgagaatggccagtgggagattatccacaagccctctcggctaatccagcctccaggtgatcctagggaagggagggaaggacagcgccaggaagtcgtcttctacctcatcatccgccggaagcctctcttctacctggtcaacgtcatcgccccatgcatcctcatcactcttctggccatcttcgtcttctacctgccaccagatgcaggagagaagatggggctctcaatctttgccctgctgacccttactgtgttcctgctgctactggccgacaaagtacctgagacctccctatcggtacccattattatcaagtacctcatgtttaccatggtcctcgtcaccttctcagtcatccttagtgtcgtggttctcaacctgcaccaccgctcaccccacacccaccaaatgcccctttgggtccgtcagatcttcattcacaaactgccgccgtacctgggtttaaaaaggcccaagcccgagagagaactgatgccggagccccctcactgttcttctccaggaagtggctggggtcggggaacagatgaatatttcatccggaagccgccaagtgattttctcttccccaaacccaacaggttccagcctgaactgtctgcccctgatctgcggcgatttatcgatggtccaaaccgggctgtggccctgcctccggagttacgggaggtcgtctcctctatcagctacatcgctcgacagctgcaggaacaggaggaccacgatgcgctgaaggaggactggcagtttgtggccatggtagtggaccgcctcttcctgtggactttcatcatcttcaccagcgttggaaccctagtcattttcctggacgccacgtaccacttgccccctccagacccctttccttgaagactggaaggtcgagacccaggccctctaccagttgaagtgagagtttggtgatactgtcaagccatatccttctctgcctcttaactccttcactaggaatccgggcctcttatttcgtttctggggactgcattggactgagggctgggtaggcaggtgtcttggacccacctgaaatgcactatcatctgatttcctctttgggatcttgaagaagctcttttgggtatcaacacctaggttgccagtgaaatagaacaaagaacaggaactagattgtaagccttatgaggtcaagaaatgtgtcttgttcactgtaacatccccagtgccatgcacaggtcctgacctatagtaagtgcttaacatttgttgaataggggaaataaatttctggaagtaaatacagcaattaataatgtttataagctgggcatggtcgctcaggccagtaatcccagtgacttggggggctgaggtgggaggattacttgaaccccacagtttgagaccagcctgggcaacatagtgagactctgtctctaaaaaaataaaaatagaaataaagtagcttattgtttgcatgtca

SEQ ID NO: 250 - RNA, 2160 nt, Macaca mulatta
  source 1..2160: mol_type = mRNA
tgacatgcaaacaataagctactttatttctatttttatttttttagagacagagtctcactatgttgcccaggctggtctcaaactgtggggttcaagtaatcctcccacctcagccccccaagtcactgggattactggcctgagcgaccatgcccagcttataaacattattaattgctgtatttacttccagaaatttatttcccctattcaacaaatgttaagcacttactataggtcaggacctgtgcatggcactggggatgttacagtgaacaagacacatttcttgacctcataaggcttacaatctagttcctgttctttgttctatttcactggcaacctaggtgttgatacccaaaagagcttcttcaagatcccaaagaggaaatcagatgatagtgcatttcaggtgggtccaagacacctgcctacccagccctcagtccaatgcagtccccagaaacgaaataagaggcccggattcctagtgaaggagttaagaggcagagaaggatatggcttgacagtatcaccaaactctcacttcaactggtagagggcctgggtctcgaccttccagtcttcaaggaaaggggtctggagggggcaagtggtacgtggcgtccaggaaaatgactagggttccaacgctggtgaagatgatgaaagtccacaggaagaggcggtccactaccatggccacaaactgccagtcctccttcagcgcatcgtggtcctcctgttcctgcagctgtcgagcgatgtagctgatagaggagacgacctcccgtaactccggaggcagggccacagcccggtttggaccatcgataaatcgccgcagatcaggggcagacagttcaggctggaacctgttgggtttggggaagagaaaatcacttggcggcttccggatgaaatattcatctgttccccgaccccagccacttcctggagaagaacagtgagggggctccggcatcagttctctctcgggcttgggcctttttaaacccaggtacggcggcagtttgtgaatgaagatctgacggacccaaaggggcatttggtgggtgtggggtgagcggtggtgcaggttgagaaccacgacactaaggatgactgagaaggtgacgaggaccatggtaaacatgaggtacttgataataatgggtaccgatagggaggtctcaggtactttgtcggccagtagcagcaggaacacagtaagggtcagcagggcaaagattgagagccccatcttctctcctgcatctggtggcaggtagaagacgaagatggccagaagagtgatgaggatgcatggggcgatgacgttgaccaggtagaagagaggcttccggcggatgatgaggtagaagacgacttcctggcgctgtccttccctcccttccctaggatcacctggaggctggattagccgagagggcttgtggataatctcccactggccattctcaatgaaagtcccttcatgaatgtggatttcctgctgctcttgcccgtcaggacccaggcctgtctgcaggctgacctccgagctgtcgtaggtgtaggaactgaacaccatagtacagttctgccagtcgaaggggaagtaggtgacctggatgctgcagctgctgcgatagatgcccgggggttgccaacgcacggagccgtcggaggacgccacgacgttaatgtccagagccacgtcaaaattcccatcattgttgttcagtagcaccacgtcagggagccacacggattccgccgtgatgcggagcaaatcgatgccgtcgtgctgcgcagggtcccagctcagcctgtagtcagtccactccaggtctaagtacacttttgtgctcatctcttcatccttctcgttcaggctgatgagttgtgccaggatgagaccaacgctgaccctgacacggtctcccacctcccgcgctggccgcacggagctatcatagccagagaaaagtttctcccggagtcggccctctgcctccgagccgcggacgcctggggtgagcggcgctcccagcgcccccagcagcatcagcagagcccctggggtcatagcctggcggctcgctcagtgacttcgctccgagagccactgggaccgccagcacaggggaa

SEQ ID NO: 251 - RNA, 2962 nt, Homo sapiens
  source 1..2962: mol_type = mRNA
attccacagccctgtagacaggaggggcagatgcacgtcccagtcagagggatgggatggaggggccagtgctgacactggggctgctggctgccctggcggtgtgtggcagctgggggctgaacgaggaggagcggctgatccggcacctgtttcaagagaagggctacaacaaggagctccggcccgtggcacacaaagaggagagtgtggacgttgccctggccctcacactctccaacctcatctccctgaaagaagttgaggagaccctcactaccaatgtgtggatagagcacggctggacagacaaccggctgaagtggaatgctgaagaatttggaaacatcagtgtcctgcgcctccccccggacatggtgtggctcccagagattgtgctggagaacaacaatgacggctccttccagatctcctactcctgcaacgtgcttgtctaccactacggcttcgtgtactggctgccacctgccatcttccgctcctcctgccccatctctgtcacctatttccccttcgactggcagaactgctccctcaagttcagttccctcaagtatacggccaaagagatcaccctgagcctgaaacaggatgccaaggagaaccgcacctaccccgtggagtggatcatcattgatcctgaaggcttcacagagaacggggagtgggagatagtccaccggccggccagggtcaacgtggaccccagagcccctctggacagccccagccgccaggacatcaccttctacctcatcatccgccgcaagcccctcttctacatcatcaacatcctggtgccctgcgtgctcatctccttcatggtcaacctggtcttctacctaccggctgacagtggtgagaagacatcagtggccatctcggtgctcctggctcagtctgtcttcctgctgctcatctccaagcgtctgcctgccacatccatggccatcccccttatcggcaagttcctgctcttcggcatggtgctggtcaccatggttgtggtgatctgtgtcatcgtgctcaacatccacttccgaacacccagcacccatgtgctgtctgagggggtcaagaagctcttcctggagaccctgccggagctcctgcacatgtcccgcccagcagaggatggacccagccctggggccctggtgcggaggagcagctccctgggatacatctccaaggccgaggagtacttcctgctcaagtcccgcagtgacctcatgttcgagaagcagtcagagcggcatgggctggccaggcgcctcaccactgcacgccggcccccagcaagctctgagcaggcccagcaggaactcttcaatgagctgaagccagctgtggatggggcaaacttcattgttaaccacatgagggaccagaacaattacaatgaggagaaagacagctggaaccgagtggcccgcacagtggaccgcctctgcctgtttgtggtgacgcctgtcatggtggtgggcacagcctggatcttcctgcagggcgtttacaaccagccaccaccccagccttttcctggggacccctactcctacaacgtgcaggacaagcgcttcatctagggtgggcctgttggggagccaggagacagcagggtctgagagaggagccacagtccctaatgacacccactcctagccctgaggctcgtgcccctcagactggggaagagtccaaggaagggagggagcagccactcctcaatgctcaatggctcccctgaaatcaagacaggggccacccgagatggtctgagggtggacatcggctacagtgggtgggcaggacgatttggggggaggcccgaggctggctcaggggccagggaggaggccactcagggtggcctcagggggagagctctgataggggtgagacagatagggccccttctctgcttctcctcccccaaggtgtggggtagagcaggcaggaatctgcgccttcactctctggcccctccagcctccctcttcctacctacccttcaacctcaggcttctgaggcctcacctgggactgaggttgaggacacctccctccctccagaccccagagtatcctttcctagctctttctgccttgacctctctgcctaggtccctttgggaagttgaggactggagtggaaaggtcaggatcgacatccacaaagacttggggtcagcctgaggttgcacacacaatcctagaggaccagaacgcagcacctctccccaaagggtccctgccccccagcacctactcctctccaaattagggttgtcatgcattatttggggcatacatattctaaaaaatcattcgttgtttctctgaaatttgtcccctatttttatttgctaaatctagcaaccctatcccaaaggcagcctccactcaatcttatcctgagggccaaaggccaaggctgcaggaattgggagacaagggtctgtttgtatggtggtccacctccaagatggccccagtgatgcccagtattcacacccttgtgcagtcccctcactctgtaccagggtgggtctgggtaaccaatagaatgaggcagaagtgatggtacctcacttcccagatttggttaggaaagacactatggcctctttcttgctcattagccctcattctcacatcagttggatctctcactttggggaagccagctggcatgttaaggagccctatggagaggcccacatggcaaggaactaaggcctcctgccaacagccacgtgagtgaatgtggaagtggatcctctgccccagtagggccttcggatgagatcacagcccagtagacatcttatgtgcagccccatgaaagtccctaagccagaaccaccagctaagtgactcctggattcctgacccccagaaactgtgtgagataataaatgtgtgttgttttaagtga

SEQ ID NO: 252 - RNA, 2962 nt, Homo sapiens
  source 1..2962: mol_type = mRNA
tcacttaaaacaacacacatttattatctcacacagtttctgggggtcaggaatccaggagtcacttagctggtggttctggcttagggactttcatggggctgcacataagatgtctactgggctgtgatctcatccgaaggccctactggggcagaggatccacttccacattcactcacgtggctgttggcaggaggccttagttccttgccatgtgggcctctccatagggctccttaacatgccagctggcttccccaaagtgagagatccaactgatgtgagaatgagggctaatgagcaagaaagaggccatagtgtctttcctaaccaaatctgggaagtgaggtaccatcacttctgcctcattctattggttacccagacccaccctggtacagagtgaggggactgcacaagggtgtgaatactgggcatcactggggccatcttggaggtggaccaccatacaaacagacccttgtctcccaattcctgcagccttggcctttggccctcaggataagattgagtggaggctgcctttgggatagggttgctagatttagcaaataaaaataggggacaaatttcagagaaacaacgaatgattttttagaatatgtatgccccaaataatgcatgacaaccctaatttggagaggagtaggtgctggggggcagggaccctttggggagaggtgctgcgttctggtcctctaggattgtgtgtgcaacctcaggctgaccccaagtctttgtggatgtcgatcctgacctttccactccagtcctcaacttcccaaagggacctaggcagagaggtcaaggcagaaagagctaggaaaggatactctggggtctggagggagggaggtgtcctcaacctcagtcccaggtgaggcctcagaagcctgaggttgaagggtaggtaggaagagggaggctggaggggccagagagtgaaggcgcagattcctgcctgctctaccccacaccttgggggaggagaagcagagaaggggccctatctgtctcacccctatcagagctctccccctgaggccaccctgagtggcctcctccctggcccctgagccagcctcgggcctccccccaaatcgtcctgcccacccactgtagccgatgtccaccctcagaccatctcgggtggcccctgtcttgatttcaggggagccattgagcattgaggagtggctgctccctcccttccttggactcttccccagtctgaggggcacgagcctcagggctaggagtgggtgtcattagggactgtggctcctctctcagaccctgctgtctcctggctccccaacaggcccaccctagatgaagcgcttgtcctgcacgttgtaggagtaggggtccccaggaaaaggctggggtggtggctggttgtaaacgccctgcaggaagatccaggctgtgcccaccaccatgacaggcgtcaccacaaacaggcagaggcggtccactgtgcgggccactcggttccagctgtctttctcctcattgtaattgttctggtccctcatgtggttaacaatgaagtttgccccatccacagctggcttcagctcattgaagagttcctgctgggcctgctcagagcttgctgggggccggcgtgcagtggtgaggcgcctggccagcccatgccgctctgactgcttctcgaacatgaggtcactgcgggacttgagcaggaagtactcctcggccttggagatgtatcccagggagctgctcctccgcaccagggccccagggctgggtccatcctctgctgggcgggacatgtgcaggagctccggcagggtctccaggaagagcttcttgaccccctcagacagcacatgggtgctgggtgttcggaagtggatgttgagcacgatgacacagatcaccacaaccatggtgaccagcaccatgccgaagagcaggaacttgccgataagggggatggccatggatgtggcaggcagacgcttggagatgagcagcaggaagacagactgagccaggagcaccgagatggccactgatgtcttctcaccactgtcagccggtaggtagaagaccaggttgaccatgaaggagatgagcacgcagggcaccaggatgttgatgatgtagaagaggggcttgcggcggatgatgaggtagaaggtgatgtcctggcggctggggctgtccagaggggctctggggtccacgttgaccctggccggccggtggactatctcccactccccgttctctgtgaagccttcaggatcaatgatgatccactccacggggtaggtgcggttctccttggcatcctgtttcaggctcagggtgatctctttggccgtatacttgagggaactgaacttgagggagcagttctgccagtcgaaggggaaataggtgacagagatggggcaggaggagcggaagatggcaggtggcagccagtacacgaagccgtagtggtagacaagcacgttgcaggagtaggagatctggaaggagccgtcattgttgttctccagcacaatctctgggagccacaccatgtccggggggaggcgcaggacactgatgtttccaaattcttcagcattccacttcagccggttgtctgtccagccgtgctctatccacacattggtagtgagggtctcctcaacttctttcagggagatgaggttggagagtgtgagggccagggcaacgtccacactctcctctttgtgtgccacgggccggagctccttgttgtagcccttctcttgaaacaggtgccggatcagccgctcctcctcgttcagcccccagctgccacacaccgccagggcagccagcagccccagtgtcagcactggcccctccatcccatccctctgactgggacgtgcatctgcccctcctgtctacagggctgtggaat

SEQ ID NO: 253 - RNA, 3003 nt, Mus musculus
  source 1..3003: mol_type = mRNA
acccctaaaccaccagcacctgtccccttgcttgcctcattccacagccaacaggctgaagggaagacaaaccctagtcagtcagaggtgggggatggcagggcctgtgctcacactggggctgctggctgcccttgttgtgtgtgccctcccaggcagttggggcctgaatgaggaacaaaggctgatccagcacctattcaatgagaagggctacgacaaagacctgcggccggtggctcgaaaggaggacaaagtggatgtcgccctaagtctcaccctctccaacctcatctccctgaaagaagtggaggagaccctcaccaccaacgtgtggatagatcatgcctgggtagacagccgtctacagtgggatgccaacgacttcgggaacatcactgtcctgcgcctgccccctgacatggtgtggctaccagagattgtactggagaacaacaatgatggctcgttccagatttcttatgcctgcaatgtgcttgtctatgactcgggctatgtgacctggctgccgcccgccatcttccgctcctcctgccccatctcagtcacctacttccctttcgactggcagaactgctccctcaaattcagttcactcaagtatacagccaaggagatcacacttagcctgaagcaggaggaggaaaacaaccgctcttaccccatcgagtggatcatcattgaccctgaaggtttcacagagaacggtgagtgggagatagtgcatcgggcagccaagctcaatgtggaccccagtgtcccgatggacagcaccaaccaccaagatgtcaccttctaccttatcatccgccgcaagcccctcttctacatcatcaacattctggtaccctgcgtgctcatctccttcatgatcaacctagtcttctacctgccaggcgactgtggagagaagacctccgtggccatctcagtgctcctggcccaatctgtcttcctgctgcttatctccaagaggctgccggccacttccatggccatccccttggtaggcaagttcctgcttttcggcatggtgctggtcaccatggtggtggtgatctgtgtcatcgtactgaacatccacttccggacgcccagcacccatgtgctgtctgagggagtcaagaagttcttcctggagaccctgcccaagctcctgcacatgtcccgcccagcagaggaagacccaggccccagggctctcatccggagaagcagctctctgggatacatctgcaaagcagaggagtatttctcacttaagtcccgcagtgacctcatgtttgagaagcaatcagagcggcatgggctggcccggcgcctcaccacagcccgcaggcctccagcaagctctgagcaggtccaacaggagctcttcaatgagatgaagccagctgtggatggggcaaacttcatcgtcaaccatatgagagaccaaaacagttacaatgaggagaaggacaactggaaccaggtggcccgcacagtggaccgtctctgcctgtttgtggtgacacccgtcatggtggtgggcacagcctggatcttcctgcagggtgtctacaaccagcccccactccagcctttccctggggaccccttctcctatagcgaacaggacaagcgcttcatctagagcaggcatgagtagacagccaggcagacagcagtctgagaacggcacgtagttcctgcccttgagcttgtgcctagcgggtgctgtgtggctgggcagaggccatggtcgggagagctcccttccggaaacaattcctttctaaataaaggagggagacacttgagatgggctaagggtggacgtggtggagagggaggctccagggttgtgaggagaagcaggggccttgctcagggggccagagaggtgaccttgggactggcttcctgggaacagtcctgtgagagatcccccaacctgagctgctcctccgcctgactgtcttccagagcaggtcagaattctgaacttgcaatttccttgccttccttcccttacctacctggggcccagagagggtgactactctccattccccagggaaggaggtttactgggatggtgggctgtccaggttgtcatctgtcagcccccgatgccttggtcgttctgtctgagtccttctgagaagcgggggactggtgtgggaggatgacacttggcatcaaaagccccatcagtgtgtgttctcacatcctagagcatcaggacccagcagcccctctaagagacccccacattgagtcccttcctcctagccccaggctctccaaaccagggttgcctagcaatatttgaggtacacttgggataaagatttatccgtcgttcatctgaagctcaaatttaaatgtgcacccagtgttcttattgagtctggtcttcaaccctatcctaaaggaaggcacattcagaactatcctgagtcctatcaatcacaggagcaaggagactaggtcttagtgtagcctgcaaagcccacctctcaaatcgtgtcttgagacagtccctgctctctgtacctggcagttcagagtaaccaatagaatgaggtagaaatgatgctatgctccttcaaagaacagcttctgagatggctgctcctgcagagtaatggcgcacacctataaccccagcacttaagaagccggagcaaacagatgagaccagcctgggttgcacacacacacacacacacacacacacacacacacacacacacagcactgcggcctctcccttccactctcccactctctttggaagtcagccacactgctgagactctgtaaaagggtccacctatcaagagccacacaggcaggtagactagaaagggggtctttctaccctgggaggacctctagatgagagctgttcaggaccctcagaaactgtcggggataataaatacatttgggagcaaaaaaaaaaaaaaaaaaaaaaaaaaaaaaaaaaaaaaa

SEQ ID NO: 254 - RNA, 3003 nt, Mus musculus
  source 1..3003: mol_type = mRNA
tttttttttttttttttttttttttttttttttttttttgctcccaaatgtatttattatccccgacagtttctgagggtcctgaacagctctcatctagaggtcctcccagggtagaaagaccccctttctagtctacctgcctgtgtggctcttgataggtggacccttttacagagtctcagcagtgtggctgacttccaaagagagtgggagagtggaagggagaggccgcagtgctgtgtgtgtgtgtgtgtgtgtgtgtgtgtgtgtgtgtgtgtgtgcaacccaggctggtctcatctgtttgctccggcttcttaagtgctggggttataggtgtgcgccattactctgcaggagcagccatctcagaagctgttctttgaaggagcatagcatcatttctacctcattctattggttactctgaactgccaggtacagagagcagggactgtctcaagacacgatttgagaggtgggctttgcaggctacactaagacctagtctccttgctcctgtgattgataggactcaggatagttctgaatgtgccttcctttaggatagggttgaagaccagactcaataagaacactgggtgcacatttaaatttgagcttcagatgaacgacggataaatctttatcccaagtgtacctcaaatattgctaggcaaccctggtttggagagcctggggctaggaggaagggactcaatgtgggggtctcttagaggggctgctgggtcctgatgctctaggatgtgagaacacacactgatggggcttttgatgccaagtgtcatcctcccacaccagtcccccgcttctcagaaggactcagacagaacgaccaaggcatcgggggctgacagatgacaacctggacagcccaccatcccagtaaacctccttccctggggaatggagagtagtcaccctctctgggccccaggtaggtaagggaaggaaggcaaggaaattgcaagttcagaattctgacctgctctggaagacagtcaggcggaggagcagctcaggttgggggatctctcacaggactgttcccaggaagccagtcccaaggtcacctctctggccccctgagcaaggcccctgcttctcctcacaaccctggagcctccctctccaccacgtccacccttagcccatctcaagtgtctccctcctttatttagaaaggaattgtttccggaagggagctctcccgaccatggcctctgcccagccacacagcacccgctaggcacaagctcaagggcaggaactacgtgccgttctcagactgctgtctgcctggctgtctactcatgcctgctctagatgaagcgcttgtcctgttcgctataggagaaggggtccccagggaaaggctggagtgggggctggttgtagacaccctgcaggaagatccaggctgtgcccaccaccatgacgggtgtcaccacaaacaggcagagacggtccactgtgcgggccacctggttccagttgtccttctcctcattgtaactgttttggtctctcatatggttgacgatgaagtttgccccatccacagctggcttcatctcattgaagagctcctgttggacctgctcagagcttgctggaggcctgcgggctgtggtgaggcgccgggccagcccatgccgctctgattgcttctcaaacatgaggtcactgcgggacttaagtgagaaatactcctctgctttgcagatgtatcccagagagctgcttctccggatgagagccctggggcctgggtcttcctctgctgggcgggacatgtgcaggagcttgggcagggtctccaggaagaacttcttgactccctcagacagcacatgggtgctgggcgtccggaagtggatgttcagtacgatgacacagatcaccaccaccatggtgaccagcaccatgccgaaaagcaggaacttgcctaccaaggggatggccatggaagtggccggcagcctcttggagataagcagcaggaagacagattgggccaggagcactgagatggccacggaggtcttctctccacagtcgcctggcaggtagaagactaggttgatcatgaaggagatgagcacgcagggtaccagaatgttgatgatgtagaagaggggcttgcggcggatgataaggtagaaggtgacatcttggtggttggtgctgtccatcgggacactggggtccacattgagcttggctgcccgatgcactatctcccactcaccgttctctgtgaaaccttcagggtcaatgatgatccactcgatggggtaagagcggttgttttcctcctcctgcttcaggctaagtgtgatctccttggctgtatacttgagtgaactgaatttgagggagcagttctgccagtcgaaagggaagtaggtgactgagatggggcaggaggagcggaagatggcgggcggcagccaggtcacatagcccgagtcatagacaagcacattgcaggcataagaaatctggaacgagccatcattgttgttctccagtacaatctctggtagccacaccatgtcagggggcaggcgcaggacagtgatgttcccgaagtcgttggcatcccactgtagacggctgtctacccaggcatgatctatccacacgttggtggtgagggtctcctccacttctttcagggagatgaggttggagagggtgagacttagggcgacatccactttgtcctcctttcgagccaccggccgcaggtctttgtcgtagcccttctcattgaataggtgctggatcagcctttgttcctcattcaggccccaactgcctgggagggcacacacaacaagggcagccagcagccccagtgtgagcacaggccctgccatcccccacctctgactgactagggtttgtcttcccttcagcctgttggctgtggaatgaggcaagcaaggggacaggtgctggtggtttaggggt

SEQ ID NO: 255 - RNA, 1696 nt, Rattus norvegicus
  source 1..1696: mol_type = mRNA
atggcagggcctgtgcccacactggggctgctggctgcccttgttgtgtgtggcagctggggcctgaatgaggaacaaaggctgatccagcacctgtttgaggaaaaaggctacaacaaagaacttcggccggtggctcgaaaggaggacatagtggatgtcgccttaagtctgaccctctccaacctcatctccctgaaagaagtggaggagaccctcaccaccaatgtgtggatagatcatgcatggatagacagccggctacaatggaatgccaacgagtttgggaacatcaccgtcctgcgcctgccctctgacatggtgtggctaccagaaattgtactggagaacaacaatgacggctcattccagatttcttacgcctgcaatgtgcttgtttctgactcgggccatgtgacctggctgccacccgccatcttccgctcctcctgccccatctcggtcacctacttccctttcgattggcagaactgctccctcaaattcagttcactcaagtataccgccaaggagatcagacttagcctgaagcaggaggaggaagacaaccgcagttaccccattgagtggatcatcattgaccctgagggtttcacagagaacggtgagtgggaaatagttcaccgggcagccaaggtcaacgtggaccccagtgtcccaatggacagcaccaaccaccaagacgtcaccttctacctcatcatccgccgcaagccgctcttctacatcatcaacatcctggtaccctgtgtgctcatctccttcatgatcaacctggtcttctacctgccaggcgactgtggagagaagacctcggtggccatctcagtgctcctggcccaatctgtcttcctgttgcttatctccaagaggctgccggccacatccatggccattcctttggtaggcaagttcctgctttttggcatggtgctggtcaccatggttgtggtgatctgcgtcatcgtgctcaacatccacttccgaacacccagcacgcatgttctgtctgagggagtcaagaagttcttcctggagaccctgcccaaactcctgcacatgtcccgcccagaagaggaagacccgggccccagggctctcatccggaggaccagctctctgggatacatctccaaggcagaggagtacttctcacttaagtcccgcagtgacctcatgtttgagaagcaatcagagcggcatgggctggcccggcgcctcaccacagcccgcaagccaccagcaagctctgagcaggtccaacaggagcttttcaatgagatgaagccagccgtggatggggcgaacttcatcgtcaaccacatgagggaccagaacagttacaatgaggagaaggacaactggaaccaggtggcccgcacagtggaccgtctctgcttgtttgtggtgacgcccgtcatggtggtgggcacagcctggatcttcctgcagggtgtctacaaccagcccccaccccagcctttccctggggaccccttctcctatgatgaacaggacaggcgcttcatttagagcaggcatgagtaaaacagtcaggcagacggcggtctgagaattgtccttgagcttgtgcctatctggggctgtgtggctgggcagaggtcatgggaggaagagctccctcccaggagcaattcctttctaaataaaggag

SEQ ID NO: 256 - RNA, 1696 nt, Rattus norvegicus
  source 1..1696: mol_type = mRNA
ctcctttatttagaaaggaattgctcctgggagggagctcttcctcccatgacctctgcccagccacacagccccagataggcacaagctcaaggacaattctcagaccgccgtctgcctgactgttttactcatgcctgctctaaatgaagcgcctgtcctgttcatcataggagaaggggtccccagggaaaggctggggtgggggctggttgtagacaccctgcaggaagatccaggctgtgcccaccaccatgacgggcgtcaccacaaacaagcagagacggtccactgtgcgggccacctggttccagttgtccttctcctcattgtaactgttctggtccctcatgtggttgacgatgaagttcgccccatccacggctggcttcatctcattgaaaagctcctgttggacctgctcagagcttgctggtggcttgcgggctgtggtgaggcgccgggccagcccatgccgctctgattgcttctcaaacatgaggtcactgcgggacttaagtgagaagtactcctctgccttggagatgtatcccagagagctggtcctccggatgagagccctggggcccgggtcttcctcttctgggcgggacatgtgcaggagtttgggcagggtctccaggaagaacttcttgactccctcagacagaacatgcgtgctgggtgttcggaagtggatgttgagcacgatgacgcagatcaccacaaccatggtgaccagcaccatgccaaaaagcaggaacttgcctaccaaaggaatggccatggatgtggccggcagcctcttggagataagcaacaggaagacagattgggccaggagcactgagatggccaccgaggtcttctctccacagtcgcctggcaggtagaagaccaggttgatcatgaaggagatgagcacacagggtaccaggatgttgatgatgtagaagagcggcttgcggcggatgatgaggtagaaggtgacgtcttggtggttggtgctgtccattgggacactggggtccacgttgaccttggctgcccggtgaactatttcccactcaccgttctctgtgaaaccctcagggtcaatgatgatccactcaatggggtaactgcggttgtcttcctcctcctgcttcaggctaagtctgatctccttggcggtatacttgagtgaactgaatttgagggagcagttctgccaatcgaaagggaagtaggtgaccgagatggggcaggaggagcggaagatggcgggtggcagccaggtcacatggcccgagtcagaaacaagcacattgcaggcgtaagaaatctggaatgagccgtcattgttgttctccagtacaatttctggtagccacaccatgtcagagggcaggcgcaggacggtgatgttcccaaactcgttggcattccattgtagccggctgtctatccatgcatgatctatccacacattggtggtgagggtctcctccacttctttcagggagatgaggttggagagggtcagacttaaggcgacatccactatgtcctcctttcgagccaccggccgaagttctttgttgtagcctttttcctcaaacaggtgctggatcagcctttgttcctcattcaggccccagctgccacacacaacaagggcagccagcagccccagtgtgggcacaggccctgccat

SEQ ID NO: 257 - RNA, 4426 nt, Macaca fascicularis
  source 1..4426: mol_type = mRNA
gaggggcagatgcaggtcccagtcagagggatgggatggaggggccagtgctgacactggggctgctggccaccctggcggtgtgtggcatctgggggctgaacgaggaggagcggctgatccggcacctgtttcaagagaagggctacaacaaggagctccggcccgtggcacacaaagaggagagtgtggacgtcaccctggccctcacgctctccaacctcatctccctgaaagaagttgaggagaccctcactaccaatgtgtggatagagcacggctggacagacaaccggctgaagtggaatgctgaagaatttggaaacatcagtgtcctgcgcctccccccagacatggtgtggctcccagagattgtgctggagaacaagttgagccaagccctccctgacctcctgtctgtcaccctgcctcctttccttaagcctcctctgcatcccccaactctgccagtcctgagtcgccagagctcactgtggttcttgtccctgttccccagcaatgatggctccttccagatctcctactcctgcaacgtgcttgtctacaactacggctttgtgtactggctgccacctgccatcttccgctcctcctgccccatctctgtcacctatttccccttcgactggcagaactgctccctcaagttcagttccctcaagtacacggccaaagagatcaccctgagcctgaagcaggatgccgaagagaaccgcacctaccccgtggagtggatcatcattgaccctgaaggcttcacagagaacggggagtgggagatagtgcatcggccggccagggtcaacgtggaccccagagcccctctggacagccccagccgccaggacgtcaccttctacctcatcatccgccgcaagcccctcttctacatcatcaacatcttggtgccctgtgtgctcatctccttcatggtcaacctggtcttctacctaccggccgacagtggtgagaagacatcagtggccatttctgtgctcctggctcagtccgtcttcctgctgctcatctccaagcggctgcccgccacatccatggccatcccccttatcggcaagttcctgctcttcggcatggtgctggtcaccatggttgtggtgatctgtgtcatcgtgctcaacatccacttccgaacacccagcacccatgtgctgtctgagggggtcaagaagctcttcctggagaccctgccagagctcctgcacatgtcccgcccagcagaggatggacccagccctggggccctggtgcggaggagcagctccctgggatacatctccaaggctgaggagtacttcttgctcaagtcccgcagcgacctcatgtttgagaagcagtcagagcggcacgggctggccaggcgcctcaccactgcacgtgggttcccgctggtcttggttttcagcccatctgtgggaggtgggggcaggcctcacacccactctggccccttgtccataggccggcccccagcaagctctgagcaggcccagcaggaactcttcaatgagctgaagccagctgtggatggggcaaacttcattgttaaccacatgagggaccagaacaattacaatgaggagaaagacagctggaaccgagtggcccgcacagtggaccgcctctgcctgtttgtggtgacgcctgttatggtggtgggcacagcctggatcttcctgcagggcgtttacaaccagccaccgccccagccttttcccggggacccctactcctacgacgtgcaggacaagcgcttcatctagggtgggcctgtgggggagccaggagacagcagggtctgagagaggagccatggtccctaatgagacccactcatagccctgaggctcacgcccctcagactggggaagagtccaaggaaggaagggaacagctactcctcaatgctcaatggctcccctgaaatcaagacagggccacctgagatggtctgagggtggacaccggctacagcaggtgggcaggacgatccgtggggaagtaggaggctggctcaggggccagggaggaggccactcagggtggcctcacagggagaactctgataggggtgagacagatagggccccttctctgctcctcctctcgcaaggtgtggggtagagcaggcaggaatctgcgccttcactccctggctcctccagcctccctcttcccacctacccttcaacctcaggcttctgaggcctcacctgggactgaggttgaggacacctccctccctccagaccccagagtctcctttcctagctctttctgccttgaccactctgcctaggtccctttgggaagttgaggactggagtggaaaggtcaggattgacatccacaaagacttggggtcaacctgaggttgcacacacaatcctagaggaccggaatgcagcacctctccccaaagggcccctgccccccagcatctactcctccccaaagtagggttgtcatgcattatttggggcatagtctaaaaaaatcattcgttgtttctctgaaatttgtcctgtatttttatttgctaaatctagcaaccctatcccaaagacagcctccattcaatcctatcctgagggccaaaggccaatactgcaggaattgggagacaagggtctgtttgtatggcagcccacctccaagatggccccggtgatagccagtattcacactcttgtgcagtcccctcactctgtaccagggtgggtctgggtaaccaacagaatgaggcagaagtgatggtacctcacttcccagattcagttaggaaagacactagggcctctttctggctcattcaccctcattctcacagcagttggatctctcactttggggaagccagctggcacgttgaggagccctatggagaggcccacacggcaaggaaataaggcctcctgccatcagccacgtgagcaaaggtggaagtggatcctctgccccagtagggcctttggatgagatcacagcccagtagacatcttacgtgcagcaccatgaaagtccctaagccagaaccaccagctaagtggctcctggattcctgatcccccagaaactgtgtgagataataaatgtgtgttgttttaagtaacaaagttttggtgtcatttgttataccagcaatgtgaccttgagtgagctgctcttcatctcttaccttccattttctaatctgcaaaatgtgtgtctagtgagtcctagtcatggggtgttgtgaaaattgaatttctagtagtagtattttcatgtgacctgcacatttaatgggtggtgatttaacccatttccctcagtggggaattggtgacctcattaactcagatatatagaaggtgagatttttaatgtttagatgtaaccaaggaaaaagaaaaaccatttaaaaccaaaactgaccccagtaacttctgccttccagcatgaactatattcacaaaattcaaggtacaaatcttttattttcctgtctaaataggaaagccagtttgttctcacacccgtcaggtgagcaggaagtctgagacttcgccaggaatagtccatcaactcagggagggtccgtcttaagtacagggatgagagtgagtctagggctctcagccacagtctttgcttctctctgcctcatggtggcgctgctggcaacaggtcttggttcaaccaccagctgagtcctcagttctattaggccctgctcaagtggctgtggacttccagagaagacaaccccaaaatgtcacacaaaactgggggggtgcctcttgcacaggctcccagggaaaccacggtttccaccagcagcacccgctcccccagcaccgtggtgctctcaggactggtccactctgactgacatggaactccatattctgtccccaggaagtcatgctcatgggcacagctttccgggaagccagagggtgttccttactctctccagaccaacagggctatacctgctctctttcaatggacagtgaatcagtaatacactgggatgcaaggaacagaaagctcaaggaattgtagtttaaacacaaaaggtttcctttttctcacataataatagggaggcggaggtgatcacatcgcctcagctgtctaacaaagctatcagggacccaggcactttgccatctgcccagccctgcctccatggcaagctggcttctgtcctcagacctattggccccaggttgcgagctgacagcaacagctgcacaattagaacctatgttcaggcagaaaagggccagccatttctgacccctttcatcaagaagcaaaacttttccagaggccggacatagtggctcacgcctgtaatcacagcactttgggaggccaaggcggctggatcacctga

SEQ ID NO: 258 - RNA, 4426 nt, Macaca fascicularis
  source 1..4426: mol_type = mRNA
tcaggtgatccagccgccttggcctcccaaagtgctgtgattacaggcgtgagccactatgtccggcctctggaaaagttttgcttcttgatgaaaggggtcagaaatggctggcccttttctgcctgaacataggttctaattgtgcagctgttgctgtcagctcgcaacctggggccaataggtctgaggacagaagccagcttgccatggaggcagggctgggcagatggcaaagtgcctgggtccctgatagctttgttagacagctgaggcgatgtgatcacctccgcctccctattattatgtgagaaaaaggaaaccttttgtgtttaaactacaattccttgagctttctgttccttgcatcccagtgtattactgattcactgtccattgaaagagagcaggtatagccctgttggtctggagagagtaaggaacaccctctggcttcccggaaagctgtgcccatgagcatgacttcctggggacagaatatggagttccatgtcagtcagagtggaccagtcctgagagcaccacggtgctgggggagcgggtgctgctggtggaaaccgtggtttccctgggagcctgtgcaagaggcacccccccagttttgtgtgacattttggggttgtcttctctggaagtccacagccacttgagcagggcctaatagaactgaggactcagctggtggttgaaccaagacctgttgccagcagcgccaccatgaggcagagagaagcaaagactgtggctgagagccctagactcactctcatccctgtacttaagacggaccctccctgagttgatggactattcctggcgaagtctcagacttcctgctcacctgacgggtgtgagaacaaactggctttcctatttagacaggaaaataaaagatttgtaccttgaattttgtgaatatagttcatgctggaaggcagaagttactggggtcagttttggttttaaatggtttttctttttccttggttacatctaaacattaaaaatctcaccttctatatatctgagttaatgaggtcaccaattccccactgagggaaatgggttaaatcaccacccattaaatgtgcaggtcacatgaaaatactactactagaaattcaattttcacaacaccccatgactaggactcactagacacacattttgcagattagaaaatggaaggtaagagatgaagagcagctcactcaaggtcacattgctggtataacaaatgacaccaaaactttgttacttaaaacaacacacatttattatctcacacagtttctgggggatcaggaatccaggagccacttagctggtggttctggcttagggactttcatggtgctgcacgtaagatgtctactgggctgtgatctcatccaaaggccctactggggcagaggatccacttccacctttgctcacgtggctgatggcaggaggccttatttccttgccgtgtgggcctctccatagggctcctcaacgtgccagctggcttccccaaagtgagagatccaactgctgtgagaatgagggtgaatgagccagaaagaggccctagtgtctttcctaactgaatctgggaagtgaggtaccatcacttctgcctcattctgttggttacccagacccaccctggtacagagtgaggggactgcacaagagtgtgaatactggctatcaccggggccatcttggaggtgggctgccatacaaacagacccttgtctcccaattcctgcagtattggcctttggccctcaggataggattgaatggaggctgtctttgggatagggttgctagatttagcaaataaaaatacaggacaaatttcagagaaacaacgaatgatttttttagactatgccccaaataatgcatgacaaccctactttggggaggagtagatgctggggggcaggggccctttggggagaggtgctgcattccggtcctctaggattgtgtgtgcaacctcaggttgaccccaagtctttgtggatgtcaatcctgacctttccactccagtcctcaacttcccaaagggacctaggcagagtggtcaaggcagaaagagctaggaaaggagactctggggtctggagggagggaggtgtcctcaacctcagtcccaggtgaggcctcagaagcctgaggttgaagggtaggtgggaagagggaggctggaggagccagggagtgaaggcgcagattcctgcctgctctaccccacaccttgcgagaggaggagcagagaaggggccctatctgtctcacccctatcagagttctccctgtgaggccaccctgagtggcctcctccctggcccctgagccagcctcctacttccccacggatcgtcctgcccacctgctgtagccggtgtccaccctcagaccatctcaggtggccctgtcttgatttcaggggagccattgagcattgaggagtagctgttcccttccttccttggactcttccccagtctgaggggcgtgagcctcagggctatgagtgggtctcattagggaccatggctcctctctcagaccctgctgtctcctggctcccccacaggcccaccctagatgaagcgcttgtcctgcacgtcgtaggagtaggggtccccgggaaaaggctggggcggtggctggttgtaaacgccctgcaggaagatccaggctgtgcccaccaccataacaggcgtcaccacaaacaggcagaggcggtccactgtgcgggccactcggttccagctgtctttctcctcattgtaattgttctggtccctcatgtggttaacaatgaagtttgccccatccacagctggcttcagctcattgaagagttcctgctgggcctgctcagagcttgctgggggccggcctatggacaaggggccagagtgggtgtgaggcctgcccccacctcccacagatgggctgaaaaccaagaccagcgggaacccacgtgcagtggtgaggcgcctggccagcccgtgccgctctgactgcttctcaaacatgaggtcgctgcgggacttgagcaagaagtactcctcagccttggagatgtatcccagggagctgctcctccgcaccagggccccagggctgggtccatcctctgctgggcgggacatgtgcaggagctctggcagggtctccaggaagagcttcttgaccccctcagacagcacatgggtgctgggtgttcggaagtggatgttgagcacgatgacacagatcaccacaaccatggtgaccagcaccatgccgaagagcaggaacttgccgataagggggatggccatggatgtggcgggcagccgcttggagatgagcagcaggaagacggactgagccaggagcacagaaatggccactgatgtcttctcaccactgtcggccggtaggtagaagaccaggttgaccatgaaggagatgagcacacagggcaccaagatgttgatgatgtagaagaggggcttgcggcggatgatgaggtagaaggtgacgtcctggcggctggggctgtccagaggggctctggggtccacgttgaccctggccggccgatgcactatctcccactccccgttctctgtgaagccttcagggtcaatgatgatccactccacggggtaggtgcggttctcttcggcatcctgcttcaggctcagggtgatctctttggccgtgtacttgagggaactgaacttgagggagcagttctgccagtcgaaggggaaataggtgacagagatggggcaggaggagcggaagatggcaggtggcagccagtacacaaagccgtagttgtagacaagcacgttgcaggagtaggagatctggaaggagccatcattgctggggaacagggacaagaaccacagtgagctctggcgactcaggactggcagagttgggggatgcagaggaggcttaaggaaaggaggcagggtgacagacaggaggtcagggagggcttggctcaacttgttctccagcacaatctctgggagccacaccatgtctggggggaggcgcaggacactgatgtttccaaattcttcagcattccacttcagccggttgtctgtccagccgtgctctatccacacattggtagtgagggtctcctcaacttctttcagggagatgaggttggagagcgtgagggccagggtgacgtccacactctcctctttgtgtgccacgggccggagctccttgttgtagcccttctcttgaaacaggtgccggatcagccgctcctcctcgttcagcccccagatgccacacaccgccagggtggccagcagccccagtgtcagcactggcccctccatcccatccctctgactgggacctgcatctgcccctc

SEQ ID NO: 259 - RNA, 3008 nt, Macaca mulatta
  source 1..3008: mol_type = mRNA
ctttgactccctcctcccccaacacctgtcccctctcccgcccaccctcattccacagccctgtagatgggaggggcagatgcaggtcccagtcagagggatgggatggaggggccagtgctgacactggggctgctggccaccctggcggtgtgtggcatctgggggctgaacgaggaggagcggctgatccggcacctgtttcaagagaagggctacaacaaggagctccggcccgtggcacacaaagaggagagtgtggacgtcaccctggccctcacgctctccaacctcatctccctgaaagaagttgaggagaccctcactaccaatgtgtggatagagcacggctggacagacaaccggctgaagtggaatgctgaagaatttggaaacatcagtgtcctgcgcctccccccagacatggtgtggctcccagagattgtgctggagaacaacaatgatggcttcttccagatctcctactcctgcaacgtgcttgtctacaactacggctttgtgtactggctgccacctgccatcttccgctcctcctgccccatctctgtcacctatttccccttcgactggcagaactgctccctcaagttcagttccctcaagtacacggccaaagagatcaccctgagcctgaagcaggatgccgaagagaaccgcacctaccccgtggagtggatcatcattgaccctgaaggcttcacagagaacggggagtgggagatagtgcaccggccggccagggtcaacgtggaccccagagcccctctggacagccccagccgccaggacgtcaccttctacctcatcatccgccgcaagcccctattctacatcatcaacatcttggtgccctgtgtgctcatctccttcatggtcaacctggtcttctacctaccggccgacagtggtgagaagacatcagtggccatttctgtgctcctggctcagtccgtcttcctgctgctcatctccaagcggctgcccgccacatccatggccatcccccttattggcaagttcctgctcttcggcatggtgctggtcaccatggttgtggtgatctgtgtcatcgtgctcaacatccacttccgaacacccagcacccatgtgctgtctgagggggtcaagaagctcttcctggagaccctgccagagctcctgcacatgtcccgcccagcagaggatggacccagccctggggccctggtgcggaggagcagctccctgggatacatctccaaggctgaggagtacttcttgctcaagtcccgcagcgacctcatgtttgagaagcagtcagagcggcacgggctggccaggcgcctcaccactgcacgccggcccccagcaagctctgagcaggcccagcaggaactcttcaatgagctgaagccagctgtggatggggcaaacttcattgttaaccacatgagggaccagaacaattacaatgaggagaaagacagctggaaccgagtggcccgcacagtggaccgcctctgcctgtttgtggtgacgcctgttatggtggtgggcacagcctggatcttcctgcagggcgtttacaaccagccaccgccccagccttttcccggggacccctactcctacgacgtgcaggacaagcgcttcatctagggtgggcctgtgggggagccaggagacagcagggtctgagagaggagccatggtccctaatgagacccactcatagccctgaggctcacgcccctcagactggggaagagtccaaggaaggaagggagcagccactcctcaatgctcaatggctcccctgaaatcaagacagggccacctgagatggtctgagggtggacaccggctacagcaggtgggcaggacgatctgtggggaagtaggaggctggctcaggggccagggaggaggccactcagggtggcctcacagggagaactctgataggggtgagacagatagggccccttctctgctcctcctctcgcaaggtgtggggtagagcaggcaggaatctgcgccttcactccctggctcctccagcctccctcttcccacctacccttcaacctcaggcttctgaggcctcacctgggactgaggttgaggacacctccctccctccagaccccagagtctcctttcctagctctttctgccttgaccactctgcctaggtccctttgggaagttgaggactggagtggaaaggtcaggattgacatccacaaagacttggggtcaacctgaggttgcacacacaatcctagaggaccggaatgcagcacctctccccaaagggcccctgccccccagcatctactcctccccaaagtagggttgtcatgcattatttggggcatattctaaaaaaatcattcgttgtttctctgaaatttgtcctgtatttttatttgctaaatctagcaaccctatcccaaagacagcctccattcaatcctatcctgagggccaaaggccaatactgcaggaattgggagacaagggtctgtttgtatggcagcccacctccaagatggccccggtgatagccagtattcacactcttgtgcagtcccctcactctgtaccagggtgggtctgggtaaccaacagaatgaggcagaagtgatggtacctcacttcccagattcagttaggaaaggcactagggcctctttctggatcattcaccctcattctcacagcagttggatctctcactttggggaagccagctggcacgttgaggagccctatggagaggcccacacggcaaggaaataaggcctcctgccatcagccacgtgagcgaaggtggaagtggatcctctgccccagtagggcctttggatgagatcacagcccagtagacatcttacgtgcagcaccatgaaagtccctaagccagaaccaccagctaagtggctcctggattcctgatcccccagaaactgtgtgagataataaatgtgtgttgttttaagtaa

SEQ ID NO: 260 - RNA, 3008 nt, Macaca mulatta
  source 1..3008: mol_type = mRNA
ttacttaaaacaacacacatttattatctcacacagtttctgggggatcaggaatccaggagccacttagctggtggttctggcttagggactttcatggtgctgcacgtaagatgtctactgggctgtgatctcatccaaaggccctactggggcagaggatccacttccaccttcgctcacgtggctgatggcaggaggccttatttccttgccgtgtgggcctctccatagggctcctcaacgtgccagctggcttccccaaagtgagagatccaactgctgtgagaatgagggtgaatgatccagaaagaggccctagtgcctttcctaactgaatctgggaagtgaggtaccatcacttctgcctcattctgttggttacccagacccaccctggtacagagtgaggggactgcacaagagtgtgaatactggctatcaccggggccatcttggaggtgggctgccatacaaacagacccttgtctcccaattcctgcagtattggcctttggccctcaggataggattgaatggaggctgtctttgggatagggttgctagatttagcaaataaaaatacaggacaaatttcagagaaacaacgaatgatttttttagaatatgccccaaataatgcatgacaaccctactttggggaggagtagatgctggggggcaggggccctttggggagaggtgctgcattccggtcctctaggattgtgtgtgcaacctcaggttgaccccaagtctttgtggatgtcaatcctgacctttccactccagtcctcaacttcccaaagggacctaggcagagtggtcaaggcagaaagagctaggaaaggagactctggggtctggagggagggaggtgtcctcaacctcagtcccaggtgaggcctcagaagcctgaggttgaagggtaggtgggaagagggaggctggaggagccagggagtgaaggcgcagattcctgcctgctctaccccacaccttgcgagaggaggagcagagaaggggccctatctgtctcacccctatcagagttctccctgtgaggccaccctgagtggcctcctccctggcccctgagccagcctcctacttccccacagatcgtcctgcccacctgctgtagccggtgtccaccctcagaccatctcaggtggccctgtcttgatttcaggggagccattgagcattgaggagtggctgctcccttccttccttggactcttccccagtctgaggggcgtgagcctcagggctatgagtgggtctcattagggaccatggctcctctctcagaccctgctgtctcctggctcccccacaggcccaccctagatgaagcgcttgtcctgcacgtcgtaggagtaggggtccccgggaaaaggctggggcggtggctggttgtaaacgccctgcaggaagatccaggctgtgcccaccaccataacaggcgtcaccacaaacaggcagaggcggtccactgtgcgggccactcggttccagctgtctttctcctcattgtaattgttctggtccctcatgtggttaacaatgaagtttgccccatccacagctggcttcagctcattgaagagttcctgctgggcctgctcagagcttgctgggggccggcgtgcagtggtgaggcgcctggccagcccgtgccgctctgactgcttctcaaacatgaggtcgctgcgggacttgagcaagaagtactcctcagccttggagatgtatcccagggagctgctcctccgcaccagggccccagggctgggtccatcctctgctgggcgggacatgtgcaggagctctggcagggtctccaggaagagcttcttgaccccctcagacagcacatgggtgctgggtgttcggaagtggatgttgagcacgatgacacagatcaccacaaccatggtgaccagcaccatgccgaagagcaggaacttgccaataagggggatggccatggatgtggcgggcagccgcttggagatgagcagcaggaagacggactgagccaggagcacagaaatggccactgatgtcttctcaccactgtcggccggtaggtagaagaccaggttgaccatgaaggagatgagcacacagggcaccaagatgttgatgatgtagaataggggcttgcggcggatgatgaggtagaaggtgacgtcctggcggctggggctgtccagaggggctctggggtccacgttgaccctggccggccggtgcactatctcccactccccgttctctgtgaagccttcagggtcaatgatgatccactccacggggtaggtgcggttctcttcggcatcctgcttcaggctcagggtgatctctttggccgtgtacttgagggaactgaacttgagggagcagttctgccagtcgaaggggaaataggtgacagagatggggcaggaggagcggaagatggcaggtggcagccagtacacaaagccgtagttgtagacaagcacgttgcaggagtaggagatctggaagaagccatcattgttgttctccagcacaatctctgggagccacaccatgtctggggggaggcgcaggacactgatgtttccaaattcttcagcattccacttcagccggttgtctgtccagccgtgctctatccacacattggtagtgagggtctcctcaacttctttcagggagatgaggttggagagcgtgagggccagggtgacgtccacactctcctctttgtgtgccacgggccggagctccttgttgtagcccttctcttgaaacaggtgccggatcagccgctcctcctcgttcagcccccagatgccacacaccgccagggtggccagcagccccagtgtcagcactggcccctccatcccatccctctgactgggacctgcatctgcccctcccatctacagggctgtggaatgagggtgggcgggagaggggacaggtgttgggggaggagggagtcaaag

SEQ ID NO: 261 - RNA, 2482 nt, Homo sapiens
  source 1..2482: mol_type = mRNA
agagctcagaataaccctgagaaccacgcagcaggatggcaagggctccgcttggggtcctgctcctcttggggcttctcggcaggggtgtggggaagaacgaggaactgcgtctttatcaccatctcttcaacaactatgacccaggaagccggccagtgcgggagcctgaggatactgtcaccatcagcctcaaggtcaccctgacgaatctcatctcactgaatgaaaaagaggagactctcaccactagcgtctggattggaatcgattggcaggattaccgactcaactacagcaaggacgactttgggggtatagaaaccctgcgagtcccttcagaactcgtgtggctgccagagattgtgctggaaaacaatattgatggccagttcggagtggcctacgacgccaacgtgctcgtctacgagggcggctccgtgacgtggctgcctccggccatctaccgcagcgtctgcgcagtggaggtcacctacttccccttcgattggcagaactgttcgcttattttccgctctcagacgtacaatgccgaagaggtggagttcacttttgccgtagacaacgacggcaagaccatcaacaagatcgacatcgacacagaggcctatactgagaacggcgagtgggccatcgacttctgcccgggggtgatccgccgccaccacggtggcgccaccgacggcccaggggagactgacgtcatctactcgctcatcatccgccggaagccgctcttctacgtcattaacatcatcgtgccctgtgtgctcatctcgggcctggtgctgctcgcctacttcctgccggcgcaggccggcggccagaaatgcacggtctccatcaacgtcctgctcgcccagaccgtcttcttgttcctcattgcccagaaaatcccagagacttctctgagcgtgccgctcctgggcaggttccttattttcgtcatggtggtcgccacgctcattgtcatgaattgcgtcatcgtgctcaacgtgtcccagcggacgcccaccacccacgccatgtccccgcggctgcgccacgttctcctggagctgctgccgcgcctcctgggctccccgccgccgcccgaggccccccgggccgcctcgcccccaaggcgggcgtcgtcggtgggcttattgctccgcgcggaggagctgatactgaaaaagccacggagcgagctcgtgtttgaggggcagaggcaccggcaggggacctggacggctgccttctgccagagcctgggcgccgccgcccccgaggtccgctgctgtgtggatgccgtgaacttcgtggccgagagcacgagagatcaggaggccaccggcgaggaagtgtccgactgggtgcgcatggggaatgcccttgacaacatctgcttctgggccgctctggtgctcttcagcgtgggctccagcctcatcttcctcggggcctacttcaaccgagtgcctgatctcccctacgcgccgtgtatccagccttagctcgcaccgacttcaatttcccacccatctccagtaggaaattgattttgaaaaagtaggctgccgccaccacggcattatgatcccttccccctgctgatcaatctgcagtttgtgaacttcacaagaatggtgtgtgcccgttccctggcgtgtgtaggcctggccgcagtccaggggtcagcaggaggaaagggttcacataggctctcaggtgccagtcttccagaaagcaaggactgcccttcattcagccttgctgacctcccagcctttctaaggctcagccccacgggactctggtggctgccagcttgtgagctatctatctatattcatttcatagccaaacaggagacccctttgcaggacttgcacacagggaggctgtagccaggaaaccctcttcttccctggtctggctctgctggagcgggtgggaaccaaacaccttcagtgctggtggccctcaggcccacaggtttaaggctgaggctgccctgacccttccacagtcatttcttctaggttttcttggcccagcactgcccatcccaccccatgaggctcactcattgcagatcccagcccaccctgcccctttcttccccaccctggaggctctctctgcctagtctacagtactgacagaaagcaaggacatgcggcctgcatggtgggagctggttgaattgtctttattaacaaacaggatatccaaggccactacattgaggaggggtggggggggagggagaagggttacttgctgctcacactatatacagatgcaagcaaggggcgtggagagtgagggctccctgctccctccctccaccggggaagggcatgggctagaagaggagaggggggtcgggaatggggggaatgttttggctggcggggtcccccctccattccctggagtttgggggaaggggaatcattaaagtgctttcagaaaa

SEQ ID NO: 262 - RNA, 2482 nt, Homo sapiens
  source 1..2482: mol_type = mRNA
ttttctgaaagcactttaatgattccccttcccccaaactccagggaatggaggggggaccccgccagccaaaacattccccccattcccgacccccctctcctcttctagcccatgcccttccccggtggagggagggagcagggagccctcactctccacgccccttgcttgcatctgtatatagtgtgagcagcaagtaacccttctccctccccccccacccctcctcaatgtagtggccttggatatcctgtttgttaataaagacaattcaaccagctcccaccatgcaggccgcatgtccttgctttctgtcagtactgtagactaggcagagagagcctccagggtggggaagaaaggggcagggtgggctgggatctgcaatgagtgagcctcatggggtgggatgggcagtgctgggccaagaaaacctagaagaaatgactgtggaagggtcagggcagcctcagccttaaacctgtgggcctgagggccaccagcactgaaggtgtttggttcccacccgctccagcagagccagaccagggaagaagagggtttcctggctacagcctccctgtgtgcaagtcctgcaaaggggtctcctgtttggctatgaaatgaatatagatagatagctcacaagctggcagccaccagagtcccgtggggctgagccttagaaaggctgggaggtcagcaaggctgaatgaagggcagtccttgctttctggaagactggcacctgagagcctatgtgaaccctttcctcctgctgacccctggactgcggccaggcctacacacgccagggaacgggcacacaccattcttgtgaagttcacaaactgcagattgatcagcagggggaagggatcataatgccgtggtggcggcagcctactttttcaaaatcaatttcctactggagatgggtgggaaattgaagtcggtgcgagctaaggctggatacacggcgcgtaggggagatcaggcactcggttgaagtaggccccgaggaagatgaggctggagcccacgctgaagagcaccagagcggcccagaagcagatgttgtcaagggcattccccatgcgcacccagtcggacacttcctcgccggtggcctcctgatctctcgtgctctcggccacgaagttcacggcatccacacagcagcggacctcgggggcggcggcgcccaggctctggcagaaggcagccgtccaggtcccctgccggtgcctctgcccctcaaacacgagctcgctccgtggctttttcagtatcagctcctccgcgcggagcaataagcccaccgacgacgcccgccttgggggcgaggcggcccggggggcctcgggcggcggcggggagcccaggaggcgcggcagcagctccaggagaacgtggcgcagccgcggggacatggcgtgggtggtgggcgtccgctgggacacgttgagcacgatgacgcaattcatgacaatgagcgtggcgaccaccatgacgaaaataaggaacctgcccaggagcggcacgctcagagaagtctctgggattttctgggcaatgaggaacaagaagacggtctgggcgagcaggacgttgatggagaccgtgcatttctggccgccggcctgcgccggcaggaagtaggcgagcagcaccaggcccgagatgagcacacagggcacgatgatgttaatgacgtagaagagcggcttccggcggatgatgagcgagtagatgacgtcagtctcccctgggccgtcggtggcgccaccgtggtggcggcggatcacccccgggcagaagtcgatggcccactcgccgttctcagtataggcctctgtgtcgatgtcgatcttgttgatggtcttgccgtcgttgtctacggcaaaagtgaactccacctcttcggcattgtacgtctgagagcggaaaataagcgaacagttctgccaatcgaaggggaagtaggtgacctccactgcgcagacgctgcggtagatggccggaggcagccacgtcacggagccgccctcgtagacgagcacgttggcgtcgtaggccactccgaactggccatcaatattgttttccagcacaatctctggcagccacacgagttctgaagggactcgcagggtttctatacccccaaagtcgtccttgctgtagttgagtcggtaatcctgccaatcgattccaatccagacgctagtggtgagagtctcctctttttcattcagtgagatgagattcgtcagggtgaccttgaggctgatggtgacagtatcctcaggctcccgcactggccggcttcctgggtcatagttgttgaagagatggtgataaagacgcagttcctcgttcttccccacacccctgccgagaagccccaagaggagcaggaccccaagcggagcccttgccatcctgctgcgtggttctcagggttattctgagctct

SEQ ID NO: 263 - RNA, 1599 nt, Mus musculus
  source 1..1599: mol_type = mRNA
ctgagaaccagacatcaggatggcaggggctctgcttggtgccctgcttctcctgacactctttggcagaagccagggaaagaatgaagagcttagcctgtatcaccatctcttcgacaattatgatccagaatgccggccagttaggagacctgaggacactgtcaccatcaccctcaaggtcaccctaaccaacctcatctcactgaacgagaaagaagaaactctgaccaccagtgtctggattggcattgactggcacgactatcggctcaactacagcaaggacgattttgcaggtgtaggaatcctccgggtcccttcagaacatgtatggctgccagagattgttctagaaaacaatattgatgggcagtttggagtggcctacgacagcaatgttctagtctatgagggaggctatgtgagctggttgcccccagccatctaccgcagcacctgcgcagtggaggtcacctatttcccctttgactggcagaactgctctctcatttttcgctcccagacctacaatgctgaggaggtggagttcatctttgccgtggatgacgacggcaataccatcaacaagattgacattgacacggcagcttttaccgagaatggagaatgggccatagactactgcccaggcatgattcgccgctatgagggaggttccacagaaggtcctggagaaactgacgtcatctatacgctcatcatccgccggaagccgcttttttacgtcattaacatcattgtgccttgcgtgctcatttctggcttggtgctgctcgcttacttcctgcctgcgcaggctggtggccagaaatgcacggtctctatcaacgtcctgctagcccagactgtcttcttgtttctaattgcccagaaaattccagagacttctctgagcgtgccactgctgggcaggtatcttatattcgtcatggtggttgccacgctcattgtcatgaattgcgtcatcgtgctcaacgtatctttgaggacgccaacgactcatgctacatcccctcggctgcgccagattttattagagctgctgccgcgtctcctgggctcgagcccacccccagaggatccccgaactgcctcaccagcgaggcgtgcctcgtctgtgggcattctgctcagagcggaggagctcatcttgaaaaagccgcggagcgaactcgtgtttgagggtcagaggcatcggcacggaacttggaccgcagccctctgccagaacctgggtgctgcagccccagaaatccgctgctgtgtggatgctgtgaactttgtggctgagagcacaagagaccaggaagccactggagaggaactgtccgactgggtgcgtatggggaaggccctggacaatgtctgtttttgggcagctttggtgctcttcagcgttggttctactctcatcttccttgggggttacttcaaccaagttcctgatctcccttacccaccgtgcatccaaccatgagcctgcactggcacccacctctcccccaccccccaagaaagagattttgaaaacaggccgctgacaataaatctggtttgtgaacttgcaaaaaaaaa

SEQ ID NO: 264 - RNA, 1599 nt, Mus musculus
  source 1..1599: mol_type = mRNA
tttttttttgcaagttcacaaaccagatttattgtcagcggcctgttttcaaaatctctttcttggggggtgggggagaggtgggtgccagtgcaggctcatggttggatgcacggtgggtaagggagatcaggaacttggttgaagtaacccccaaggaagatgagagtagaaccaacgctgaagagcaccaaagctgcccaaaaacagacattgtccagggccttccccatacgcacccagtcggacagttcctctccagtggcttcctggtctcttgtgctctcagccacaaagttcacagcatccacacagcagcggatttctggggctgcagcacccaggttctggcagagggctgcggtccaagttccgtgccgatgcctctgaccctcaaacacgagttcgctccgcggctttttcaagatgagctcctccgctctgagcagaatgcccacagacgaggcacgcctcgctggtgaggcagttcggggatcctctgggggtgggctcgagcccaggagacgcggcagcagctctaataaaatctggcgcagccgaggggatgtagcatgagtcgttggcgtcctcaaagatacgttgagcacgatgacgcaattcatgacaatgagcgtggcaaccaccatgacgaatataagatacctgcccagcagtggcacgctcagagaagtctctggaattttctgggcaattagaaacaagaagacagtctgggctagcaggacgttgatagagaccgtgcatttctggccaccagcctgcgcaggcaggaagtaagcgagcagcaccaagccagaaatgagcacgcaaggcacaatgatgttaatgacgtaaaaaagcggcttccggcggatgatgagcgtatagatgacgtcagtttctccaggaccttctgtggaacctccctcatagcggcgaatcatgcctgggcagtagtctatggcccattctccattctcggtaaaagctgccgtgtcaatgtcaatcttgttgatggtattgccgtcgtcatccacggcaaagatgaactccacctcctcagcattgtaggtctgggagcgaaaaatgagagagcagttctgccagtcaaaggggaaataggtgacctccactgcgcaggtgctgcggtagatggctgggggcaaccagctcacatagcctccctcatagactagaacattgctgtcgtaggccactccaaactgcccatcaatattgttttctagaacaatctctggcagccatacatgttctgaagggacccggaggattcctacacctgcaaaatcgtccttgctgtagttgagccgatagtcgtgccagtcaatgccaatccagacactggtggtcagagtttcttctttctcgttcagtgagatgaggttggttagggtgaccttgagggtgatggtgacagtgtcctcaggtctcctaactggccggcattctggatcataattgtcgaagagatggtgatacaggctaagctcttcattctttccctggcttctgccaaagagtgtcaggagaagcagggcaccaagcagagcccctgccatcctgatgtctggttctcag

SEQ ID NO: 265 - RNA, 1624 nt, Rattus norvegicus
  source 1..1624: mol_type = mRNA
gcttgtcaaagctcagaataacctgagaaccagacatcaggatgacaatggctctgcttgggaccctgcttctcctggcactctttggcagaagccaaggcaagaatgaagagctgagcctgtatcaccatctcttcgacaattatgacccagaatgccggccagttaggagacctgaggacactgtcaccatcaccctcaaggtcaccctaaccaacctcatctcactgaatgagaaagaagagactctgaccaccagtgtctggattggaattgaatggcaagactatcggctcaacttcagcaaggacgattttgcaggcgtagaaatcctgcgggtcccttccgaacatgtatggctgccagagattgttctggaaaacaatattgatgggcagtttggagtggcctacgactgcaatgttctggtctatgagggaggctctgtgagctggctgcccccagctatctaccgcagcacgtgcgcagtggaggtcacctatttcccctttgactggcagaactgctctctcatttttcgttcccagacctacaatgctgaagaggtggagttaatctttgcagtggatgacgatggcaatgccatcaacaaaattgacatcgacaccgcagcttttaccgagaatggagaatgggccattgactactgcccaggcatgattcgccattatgagggaggctccacagaagaccctggagaaactgacgtcatctacacgctcatcatccgtcgaaagccgcttttttacgtcattaacatcattgtgccttgtgtgctcatttctggcttggtgctactcgcttacttcctacctgcgcaggctggtggccagaaatgcacggtctctatcaacgtcctgctagcccagactgtcttcttgttcctaattgcccagaaaattccagagacttctctgagcgtgccgctgctgggcaggtatcttatttttgtcatggtggttgccacgctcattgtcatgaattgcgtcatcgtgctcaacgtatctttgcgaacgccaacgactcacgccacatcccctcggctgcgccagattttattagagctactgccgcgcctcctcggcttgagcccacccccagaggatcccggagctgcctcaccagcgaggcgtgcctcatctgtgggcattctgcttagagcggaggagctcatcttgaaaaagccgcggagcgaactcgtgtttgagggacagaggcatcggcatggaacttggaccgcagccgccctctgccagaacctgggtgctgcagcccctgaagtccgctgctgtgtggatgctgtgaactttgtggctgagagcacaagggaccaggaagccactggagaggaactgtctgactgggtgcgtatggggaaggccctcgacaatgtctgtttttgggcagcgttggtgctcttcagcgtcggttctacgctcatcttccttggaggttacttcaaccaagttcctgatctcccctacccaccgtgcatccaaccatgagcctgcaccaggacccacctcatccccaccccccaagaaagagattttgaaaacaggctgctgacaataaatctggtttgtgaacttgcaaaaaaaaa

SEQ ID NO: 266 - RNA, 1624 nt, Rattus norvegicus
  source 1..1624: mol_type = mRNA
tttttttttgcaagttcacaaaccagatttattgtcagcagcctgttttcaaaatctctttcttggggggtggggatgaggtgggtcctggtgcaggctcatggttggatgcacggtgggtaggggagatcaggaacttggttgaagtaacctccaaggaagatgagcgtagaaccgacgctgaagagcaccaacgctgcccaaaaacagacattgtcgagggccttccccatacgcacccagtcagacagttcctctccagtggcttcctggtcccttgtgctctcagccacaaagttcacagcatccacacagcagcggacttcaggggctgcagcacccaggttctggcagagggcggctgcggtccaagttccatgccgatgcctctgtccctcaaacacgagttcgctccgcggctttttcaagatgagctcctccgctctaagcagaatgcccacagatgaggcacgcctcgctggtgaggcagctccgggatcctctgggggtgggctcaagccgaggaggcgcggcagtagctctaataaaatctggcgcagccgaggggatgtggcgtgagtcgttggcgttcgcaaagatacgttgagcacgatgacgcaattcatgacaatgagcgtggcaaccaccatgacaaaaataagatacctgcccagcagcggcacgctcagagaagtctctggaattttctgggcaattaggaacaagaagacagtctgggctagcaggacgttgatagagaccgtgcatttctggccaccagcctgcgcaggtaggaagtaagcgagtagcaccaagccagaaatgagcacacaaggcacaatgatgttaatgacgtaaaaaagcggctttcgacggatgatgagcgtgtagatgacgtcagtttctccagggtcttctgtggagcctccctcataatggcgaatcatgcctgggcagtagtcaatggcccattctccattctcggtaaaagctgcggtgtcgatgtcaattttgttgatggcattgccatcgtcatccactgcaaagattaactccacctcttcagcattgtaggtctgggaacgaaaaatgagagagcagttctgccagtcaaaggggaaataggtgacctccactgcgcacgtgctgcggtagatagctgggggcagccagctcacagagcctccctcatagaccagaacattgcagtcgtaggccactccaaactgcccatcaatattgttttccagaacaatctctggcagccatacatgttcggaagggacccgcaggatttctacgcctgcaaaatcgtccttgctgaagttgagccgatagtcttgccattcaattccaatccagacactggtggtcagagtctcttctttctcattcagtgagatgaggttggttagggtgaccttgagggtgatggtgacagtgtcctcaggtctcctaactggccggcattctgggtcataattgtcgaagagatggtgatacaggctcagctcttcattcttgccttggcttctgccaaagagtgccaggagaagcagggtcccaagcagagccattgtcatcctgatgtctggttctcaggttattctgagctttgacaagc

SEQ ID NO: 267 - RNA, 2117 nt, Macaca fascicularis
  source 1..2117: mol_type = mRNA
tgccccctccaagccttccagagctcagaataatcctgagaaccaggcagcaggatggcaggggctcctcttggggtcctgctcctcttggggctcctcggcagtggtgtggggaagaacgaagaactgcgtctttatcaccatctcttcgacaactatgactcaggaagccggccagtgcgggagcctgaggatactgtcaccatcagcctcaaggtcaccctgacgaatctcatctcactgaatgaaaaagaggagactctcaccactaacgtctggatcggaatcgattggcaggattaccgactcaactacagcaaggacgactttgggggcatagaaattctgcgagtcccttcagaactcgtgtggctgccagagattgttctggaaaacaatattgatggccagttcggcgtggcctacgacgccaacgtgctggtctacgaggatggctccgtgacgtggttgcctccagccatctaccgcagcgtctgcgccgtggaggtcacctacttccccttcgattggcagaactgttcacttattttccgctctcagacgtacaatgccgaagaagtggagttcacctttgctgtggacgactccggcgagaccatcaacaagatcgacatcgacactgaggcctatactgagaacggcgagtgggccatcgattactgcccgggggtgatccgccgccacgacagtggcgccaccgacggcccaggggagactgacgtcgtctactcgctcatcatccgccggaagccgctcttctacgtcattaacatcatcgtgccctgtgtgctcatctcgggcctggtgcttctcgcctacttcctgccggcgcaggccggcggccagaaatgcacggtctccatcaacgtcctgctcgcccagaccgtcttcttgttcctcattgcccagaaaatcccagagacgtctctgagcgtgccgctcctgggcaggttccttattttcgtcatggtggtcgccacgctcattgtcatgaattgcgtcatcgtgctcaacgtgtccctgcggacgcccacgacccacagcatgtccccgcggctgcgctacgttctcctggagctgctgccgcgcctgctgggctccccgccgccccccgaggctccccgagccgcctcgcctccaaggcgggcgtcgtctgtgggcttattgctccgcgcggaggagctgatactaaaaaagccgcggagcgagctcgtgtttgaggggcagaggcaccggcacgggacctggacggctgccttctgccagagcctgggcgccgccgcccccgaggtccgctgctgtgtggatgccgtgaacttcgtggccgagagcacgagagatcaggaggccaccggcgagtgtccgactgggtgcgcatggggaatgcccttgacaacatctgcttctgggccgctctggtgctcttcagcgtgggctccagcctcatcttcctcggggcctacttcaaccgagtgcctgatctcccgtacccgccgtgtatccagccttagtgcgcaccgacttcaacttcccacccatctccagaagaatggtgtgtgcccaccccttggtgtgtgcaggcctggccccagtccaggggtcagcaggaggaaacgattcacacaggctctcaggtgccagtgttccagaaagcaaggactgcccttcattcagccttgctgacctcccagcctttctcaggcccagccccaggggactctggaggctgccagcttgtgagctgcctttgttcatctcatagccagacaggagacccctttgcaggacttgcacatagggaggctggagccaggaaaccctcttcttccctggtctggctctgctggagctggtgggaaccaaaccccttcagtgccggtggccctctggcccacaagtttagggctgaggctgccctggtcctcctgcagtcatttcttctaggttttcttggcccagcactgcccatcccaacccccatgaggctcgctcattgcagatcccagcccaccctgcccctttcttctgcaccctggaggctctctctgcctagtatacaggactgagagaaagcaataaaatggggcctgcatggt

SEQ ID NO: 268 - RNA, 2117 nt, Macaca fascicularis
  source 1..2117: mol_type = mRNA
accatgcaggccccattttattgctttctctcagtcctgtatactaggcagagagagcctccagggtgcagaagaaaggggcagggtgggctgggatctgcaatgagcgagcctcatgggggttgggatgggcagtgctgggccaagaaaacctagaagaaatgactgcaggaggaccagggcagcctcagccctaaacttgtgggccagagggccaccggcactgaaggggtttggttcccaccagctccagcagagccagaccagggaagaagagggtttcctggctccagcctccctatgtgcaagtcctgcaaaggggtctcctgtctggctatgagatgaacaaaggcagctcacaagctggcagcctccagagtcccctggggctgggcctgagaaaggctgggaggtcagcaaggctgaatgaagggcagtccttgctttctggaacactggcacctgagagcctgtgtgaatcgtttcctcctgctgacccctggactggggccaggcctgcacacaccaaggggtgggcacacaccattcttctggagatgggtgggaagttgaagtcggtgcgcactaaggctggatacacggcgggtacgggagatcaggcactcggttgaagtaggccccgaggaagatgaggctggagcccacgctgaagagcaccagagcggcccagaagcagatgttgtcaagggcattccccatgcgcacccagtcggacactcgccggtggcctcctgatctctcgtgctctcggccacgaagttcacggcatccacacagcagcggacctcgggggcggcggcgcccaggctctggcagaaggcagccgtccaggtcccgtgccggtgcctctgcccctcaaacacgagctcgctccgcggcttttttagtatcagctcctccgcgcggagcaataagcccacagacgacgcccgccttggaggcgaggcggctcggggagcctcggggggcggcggggagcccagcaggcgcggcagcagctccaggagaacgtagcgcagccgcggggacatgctgtgggtcgtgggcgtccgcagggacacgttgagcacgatgacgcaattcatgacaatgagcgtggcgaccaccatgacgaaaataaggaacctgcccaggagcggcacgctcagagacgtctctgggattttctgggcaatgaggaacaagaagacggtctgggcgagcaggacgttgatggagaccgtgcatttctggccgccggcctgcgccggcaggaagtaggcgagaagcaccaggcccgagatgagcacacagggcacgatgatgttaatgacgtagaagagcggcttccggcggatgatgagcgagtagacgacgtcagtctcccctgggccgtcggtggcgccactgtcgtggcggcggatcacccccgggcagtaatcgatggcccactcgccgttctcagtataggcctcagtgtcgatgtcgatcttgttgatggtctcgccggagtcgtccacagcaaaggtgaactccacttcttcggcattgtacgtctgagagcggaaaataagtgaacagttctgccaatcgaaggggaagtaggtgacctccacggcgcagacgctgcggtagatggctggaggcaaccacgtcacggagccatcctcgtagaccagcacgttggcgtcgtaggccacgccgaactggccatcaatattgttttccagaacaatctctggcagccacacgagttctgaagggactcgcagaatttctatgcccccaaagtcgtccttgctgtagttgagtcggtaatcctgccaatcgattccgatccagacgttagtggtgagagtctcctctttttcattcagtgagatgagattcgtcagggtgaccttgaggctgatggtgacagtatcctcaggctcccgcactggccggcttcctgagtcatagttgtcgaagagatggtgataaagacgcagttcttcgttcttccccacaccactgccgaggagccccaagaggagcaggaccccaagaggagcccctgccatcctgctgcctggttctcaggattattctgagctctggaaggcttggagggggca

SEQ ID NO: 269 - RNA, 2213 nt, Macaca mulatta
  source 1..2213: mol_type = mRNA
tgccccctccaagccttccagagctcagaataatcctgagaaccaggcagcaggatggcaggggctcctcttggggtcctgctcctcttggggctcctcggcagtggtgtggggaagaacgaagaactgcgtctttatcaccatctcttcgacaactatgactcaggaagccggccagtgcgggagcctgaggatactgtcaccatcagcctcaaggtcaccctgacgaatctcatctcactgaatgaaaaagaggagactctcaccactaacgtctggatcggaatcgattggcaggattaccgactcaactacagcaaggacgactttgggggcatagaaattctgcgagtcccttcagaactcgtgtggctgccagagattgttctggaaaacaatattgatggccagttcggcgtggcctacgacgtcaacgtgctggtctacgaggatggctccgtgacgtggttgcctccggccatctaccgcagcgtctgcgccgtggaggtcacctacttccccttcgattggcagaactgttcgcttattttccgctctcagacgtacaatgccgaagaagtggagttcacctttgctgtggacgactccggcgagaccatcaacaagatcgacatcgacactgaggcctatactgagaacggcgagtgggccatcgattactgcccgggggtgatccgccgccacgacagtggcgccaccgacggcccaggggagactgacgtcgtctactcgctcatcatccgccggaagccgctcttctacgtcattaacatcatcgtgccctgtgtgctcatctcgggcctggtgcttctcgcctacttcctgccggcgcaggccggcggccagaaatgcacggtctccatcaacgtcctgctcgcccagaccgtcttcttgttcctcattgcccagaaaatcccagagacgtctctgagcgtgccgctcctgggcaggttccttattttcgtcatggtggtcgccacgctcattgtcatgaattgcgtcatcgtgctcaacgtgtccctgcggacgcccacgacccacagcatgtccccgcggctgcgccacgttctcctggagctgctgccgcgcctgctgggctccccgccgccccccgaggctccccgagccgcctcgcctccaaggcgggcgtcgtctgtgggcttattgctccgcgcggaggagctgatactaaaaaagccgcggagcgagctcgtgtttgaggggcagaggcaccggcacgggacctggacggctgccttctgccagagcctgggcgccgccgcccccgaggtccgctgctgtgtggatgccgtgaacttcgtggccgagagcacgagagatcaggaggccaccggcgaggaagtgtccgactgggtgcgcatggggaatgcccttgacaacatctgcttctgggccgctctggtgctcttcagcgtgggctccagcctcatcttcctcggggcctacttcaaccgagtgcctgatctcccgtacccgccgtgtatccagccttagtgcgcaccgacttcaacttcccacccatctccagtaggaaactgattttgaaaaaggctgccgccaccgcggcattctgatcccttcccacggctgatcaatctgtattttgtgaactttacaggaagaatggtgtgtgcccaccccttggtgtgtgtaggcctggccccagtccaggggtcagcaggaggaaacgattcacacaggctctcaggtgccagtgttccagaaagcaaggactgcccttcattcagccttgctgacctcccagcctttctcaggcccagccccaggggactctggaggctgccagcttgtgagctgcctttgttcatctcagagccagacaggagacccctttgcaggacttgcacatagggaggctggagccaggaaaccctcttcttccctggtctggctctgctggagctggtgggaaccaaaccccttcagtgccggtggccctctggcccacaagtttagggctgaggctgccctggtcctcccgcagtcatttcttctaggttttcttggcccagcactgcccatcccaacccccatgaggctcgctcattgcagatcccagcccaccctgcccctttcttctgcaccctggaggctctctctgcctagtatacaggactgagagaaagcaataaaatggggcctgcatggtg

SEQ ID NO: 270 - RNA, 2213 nt, Macaca mulatta
  source 1..2213: mol_type = mRNA
caccatgcaggccccattttattgctttctctcagtcctgtatactaggcagagagagcctccagggtgcagaagaaaggggcagggtgggctgggatctgcaatgagcgagcctcatgggggttgggatgggcagtgctgggccaagaaaacctagaagaaatgactgcgggaggaccagggcagcctcagccctaaacttgtgggccagagggccaccggcactgaaggggtttggttcccaccagctccagcagagccagaccagggaagaagagggtttcctggctccagcctccctatgtgcaagtcctgcaaaggggtctcctgtctggctctgagatgaacaaaggcagctcacaagctggcagcctccagagtcccctggggctgggcctgagaaaggctgggaggtcagcaaggctgaatgaagggcagtccttgctttctggaacactggcacctgagagcctgtgtgaatcgtttcctcctgctgacccctggactggggccaggcctacacacaccaaggggtgggcacacaccattcttcctgtaaagttcacaaaatacagattgatcagccgtgggaagggatcagaatgccgcggtggcggcagcctttttcaaaatcagtttcctactggagatgggtgggaagttgaagtcggtgcgcactaaggctggatacacggcgggtacgggagatcaggcactcggttgaagtaggccccgaggaagatgaggctggagcccacgctgaagagcaccagagcggcccagaagcagatgttgtcaagggcattccccatgcgcacccagtcggacacttcctcgccggtggcctcctgatctctcgtgctctcggccacgaagttcacggcatccacacagcagcggacctcgggggcggcggcgcccaggctctggcagaaggcagccgtccaggtcccgtgccggtgcctctgcccctcaaacacgagctcgctccgcggcttttttagtatcagctcctccgcgcggagcaataagcccacagacgacgcccgccttggaggcgaggcggctcggggagcctcggggggcggcggggagcccagcaggcgcggcagcagctccaggagaacgtggcgcagccgcggggacatgctgtgggtcgtgggcgtccgcagggacacgttgagcacgatgacgcaattcatgacaatgagcgtggcgaccaccatgacgaaaataaggaacctgcccaggagcggcacgctcagagacgtctctgggattttctgggcaatgaggaacaagaagacggtctgggcgagcaggacgttgatggagaccgtgcatttctggccgccggcctgcgccggcaggaagtaggcgagaagcaccaggcccgagatgagcacacagggcacgatgatgttaatgacgtagaagagcggcttccggcggatgatgagcgagtagacgacgtcagtctcccctgggccgtcggtggcgccactgtcgtggcggcggatcacccccgggcagtaatcgatggcccactcgccgttctcagtataggcctcagtgtcgatgtcgatcttgttgatggtctcgccggagtcgtccacagcaaaggtgaactccacttcttcggcattgtacgtctgagagcggaaaataagcgaacagttctgccaatcgaaggggaagtaggtgacctccacggcgcagacgctgcggtagatggccggaggcaaccacgtcacggagccatcctcgtagaccagcacgttgacgtcgtaggccacgccgaactggccatcaatattgttttccagaacaatctctggcagccacacgagttctgaagggactcgcagaatttctatgcccccaaagtcgtccttgctgtagttgagtcggtaatcctgccaatcgattccgatccagacgttagtggtgagagtctcctctttttcattcagtgagatgagattcgtcagggtgaccttgaggctgatggtgacagtatcctcaggctcccgcactggccggcttcctgagtcatagttgtcgaagagatggtgataaagacgcagttcttcgttcttccccacaccactgccgaggagccccaagaggagcaggaccccaagaggagcccctgccatcctgctgcctggttctcaggattattctgagctctggaaggcttggagggggca

SEQ ID NO: 271 - RNA, 4009 nt, Homo sapiens
  source 1..4009: mol_type = mRNA
gccccagaccttggagctgttgtcccacccctgtcactgcagagagctgaggcaccatgcatgggggccaggggccgctgctcctcctgctgctgctggctgtctgcctgggggcccagggccggaaccaggaggagcgcctgctcgcagacctgatgcaaaactacgaccccaacctgcggcccgcggaacgagactcggatgtggtcaatgtcagcctgaagctaaccctcaccaacctcatctccctgaacgagcgagaggaagccctcaccaccaatgtctggatagagatgcagtggtgcgactatcgcctgcgctgggatccgcgagactacgaaggcctgtgggtgctgagggtgccgtccaccatggtgtggcggccggatatcgtgctggagaacaacgtggacggtgtcttcgaggtggccctctactgcaatgtgctcgtgtcccctgacggctgtatctactggctgccgcctgccatcttccgttccgcctgctctatctcagtcacctacttccccttcgactggcagaactgctcccttatcttccagtcccagacttacagcaccaatgagattgatctgcagctgagtcaggaagatggccagaccatcgagtggattttcattgaccctgaggccttcacagagaatggggagtgggccatccagcaccgaccagccaagatgctcctggacccagcggcgccagcccaggaagcaggccaccagaaggtggtgttctacctgctcatccagcgcaagcccctcttctacgtcatcaacatcatcgccccctgtgtgctcatctcctctgtcgccatcctcatccacttccttcctgccaaggctgggggccagaagtgtaccgtcgccatcaacgtgctcctggcccagactgtcttcctcttccttgtggccaagaaggtgcctgaaacctcccaggcggtgccactcatcagcaagtacctgaccttcctcctggtggtgaccatcctcattgtcgtgaatgctgtggttgtgctcaatgtctccttgcggtctccacacacacactccatggcccgaggggtccgcaaggtgttcctgaggctcttgccccagctgctgaggatgcacgttcgcccgctggccccggcagctgtgcaggacacccagtcccggctacagaatggctcctcgggatggtcgatcacaactggggaggaggtggccctctgcctgcctcgcagtgaactcctcttccagcagtggcagcggcaagggctggtggcggcagcgctggagaagctagagaaaggcccggagttagggctgagccagttctgtggcagcctgaagcaggctgccccagccatccaggcctgtgtggaagcctgcaacctcattgcctgtgcccggcaccagcagagtcactttgacaatgggaatgaggagtggttcctggtgggccgagtgctggaccgcgtctgcttcctggccatgctctcgctcttcatctgtggcacagctggcatcttcctcatggcccactacaaccgggtgccggccctgccattccctggagatccacgcccctacctgccctcaccagactgagccaaccaaccactgtggggcatgtgggagtcacacacgtgggtcacactgagtcttatcagccacgttctcctactgaggtcctaagtgtgctctttgggaagtgcccttcaggactgtgtgagccaaacagccctgagaaaagctggggaaacagtctgagctggagtccgagagtggttgggggtgggccgtggctagtgtcctgctgcagtcagcacacacgtgggattggctagctcatcctggcaccagccacccctccactcagtgcactcccctcacttaggcaaagcattattcattcccatcagtctgaagcccgaaggactgttttgtataataccttcggacttgggactggctccccttttacaagttctccctgaaagagggcagtcacaagaggtgtgaagagtagcagccgatgctctctccaaagcagggcagcagcccataccagctggcatctcccccccgtgccttctgggtacaataagcacccaattctcaacagccccagtggcctttccattcatgtgcatttttctgccactgaccacaagacgatttcctgagttttgtaatcctcttttttttttttttttttttagtttttgatgtgttgttgttgttttgtttagttttgagatagagcctcactcttgtcatgcaagttggagtggagtggcatgatcatggctcactgcagcctcaacctccagggctcaagcaatgctcctgcctcagcctcccaagtagctggcaccacaggcatgcaccactacacccagctacttttaaatttttagtagagatgaggttttgctatgttgcctaggttggtcttgaactcctgagctcaagtgatcctcccacttgagtcttgggattacaggcataagccactgtacctggcctcctttttaattaagagctcctcacagcagtatggataagcaagagtcattattccccatgttatataggcaaattgagcctagagtaagcgggactccacacaacagtggtggttaaacaaggtttgaagtccagaattcctgactctgacccaatctgacactctaagattctacggcctgaaaaacaggcccttcttcccaaaggatggttaagacaaggaagagctaggcaagaggaggtgtggagttaacagagagccactgagctcttcattccaggaggagactttgactggcctcccttgaccccactaatcaggtagtaaggctggggtcttcctgggggagaggcaaggtcctgctctgagattacagccggcacacgagtttggctggtaaccaggggacacccttgggcaagtcacctatgctccctgaggctgttccctcatctgtaaataaggtgcaaaaaataatccattcctggccaggtgtggtggctcacacctgcaatcccagcaccttgggaggacaaggtgggtggactgcttgagctcaggagcccacgaacccaggaacccagcctgggcaacatggggacacccggcctctaccaaaaaatacaaaacttagctgggcgtggtgatgcatgcctgtagtcccagttactcgggaggctgaggtgggaggatcgcttgagcccaggaggtctaggctgcagtgagctgtgatcatgtgactgcactccagcctgatgacacagtaagaccctgtctcaaaaaaaataaaaaaattacaaaactgaaaaaagaaaagtgaaagtgccacataaaggcctgacgacaggatatgctggcaggaggggaccttggaaatatgccctccctccaagcacaggattgctgtctttgggattcaatcaccagcaagttcgtattatttactccagtgtgagtctgtgtctgtgcatgcacagtgtgtttgaagcaagagcagagtcagagctatagagaactagaggagttagggagagtgggggagaacttcaatcagggagggaatctgatgacagtggggccatttccggttcccaccagccccttactagttgtgtatctggcacaagtctctcaacctctctgaaagcctcagagggcagaggattagctccttgtacacaataaacactcaaatgttaacattagctgccattactataagttactgtctcatgggatccatacagcaacctaaggaggtaggtcgaggcatacctcaaagacattgcaggttcagttccagaccaacacaagaaagcaagtcacatgaatgtttttggtttcccaatgcatataaaagttatgtttacactatactgtagaccagcaagagtgcaatagcattgtctaataaaacaatatacatacctaaatttaaaaatactttattgctaaaaaatgctgattatcaatctga

SEQ ID NO: 272 - RNA, 4009 nt, Homo sapiens
  source 1..4009: mol_type = mRNA
tcagattgataatcagcattttttagcaataaagtatttttaaatttaggtatgtatattgttttattagacaatgctattgcactcttgctggtctacagtatagtgtaaacataacttttatatgcattgggaaaccaaaaacattcatgtgacttgctttcttgtgttggtctggaactgaacctgcaatgtctttgaggtatgcctcgacctacctccttaggttgctgtatggatcccatgagacagtaacttatagtaatggcagctaatgttaacatttgagtgtttattgtgtacaaggagctaatcctctgccctctgaggctttcagagaggttgagagacttgtgccagatacacaactagtaaggggctggtgggaaccggaaatggccccactgtcatcagattccctccctgattgaagttctcccccactctccctaactcctctagttctctatagctctgactctgctcttgcttcaaacacactgtgcatgcacagacacagactcacactggagtaaataatacgaacttgctggtgattgaatcccaaagacagcaatcctgtgcttggagggagggcatatttccaaggtcccctcctgccagcatatcctgtcgtcaggcctttatgtggcactttcacttttcttttttcagttttgtaatttttttattttttttgagacagggtcttactgtgtcatcaggctggagtgcagtcacatgatcacagctcactgcagcctagacctcctgggctcaagcgatcctcccacctcagcctcccgagtaactgggactacaggcatgcatcaccacgcccagctaagttttgtattttttggtagaggccgggtgtccccatgttgcccaggctgggttcctgggttcgtgggctcctgagctcaagcagtccacccaccttgtcctcccaaggtgctgggattgcaggtgtgagccaccacacctggccaggaatggattattttttgcaccttatttacagatgagggaacagcctcagggagcataggtgacttgcccaagggtgtcccctggttaccagccaaactcgtgtgccggctgtaatctcagagcaggaccttgcctctcccccaggaagaccccagccttactacctgattagtggggtcaagggaggccagtcaaagtctcctcctggaatgaagagctcagtggctctctgttaactccacacctcctcttgcctagctcttccttgtcttaaccatcctttgggaagaagggcctgtttttcaggccgtagaatcttagagtgtcagattgggtcagagtcaggaattctggacttcaaaccttgtttaaccaccactgttgtgtggagtcccgcttactctaggctcaatttgcctatataacatggggaataatgactcttgcttatccatactgctgtgaggagctcttaattaaaaaggaggccaggtacagtggcttatgcctgtaatcccaagactcaagtgggaggatcacttgagctcaggagttcaagaccaacctaggcaacatagcaaaacctcatctctactaaaaatttaaaagtagctgggtgtagtggtgcatgcctgtggtgccagctacttgggaggctgaggcaggagcattgcttgagccctggaggttgaggctgcagtgagccatgatcatgccactccactccaacttgcatgacaagagtgaggctctatctcaaaactaaacaaaacaacaacaacacatcaaaaactaaaaaaaaaaaaaaaaaaaagaggattacaaaactcaggaaatcgtcttgtggtcagtggcagaaaaatgcacatgaatggaaaggccactggggctgttgagaattgggtgcttattgtacccagaaggcacgggggggagatgccagctggtatgggctgctgccctgctttggagagagcatcggctgctactcttcacacctcttgtgactgccctctttcagggagaacttgtaaaaggggagccagtcccaagtccgaaggtattatacaaaacagtccttcgggcttcagactgatgggaatgaataatgctttgcctaagtgaggggagtgcactgagtggaggggtggctggtgccaggatgagctagccaatcccacgtgtgtgctgactgcagcaggacactagccacggcccacccccaaccactctcggactccagctcagactgtttccccagcttttctcagggctgtttggctcacacagtcctgaagggcacttcccaaagagcacacttaggacctcagtaggagaacgtggctgataagactcagtgtgacccacgtgtgtgactcccacatgccccacagtggttggttggctcagtctggtgagggcaggtaggggcgtggatctccagggaatggcagggccggcacccggttgtagtgggccatgaggaagatgccagctgtgccacagatgaagagcgagagcatggccaggaagcagacgcggtccagcactcggcccaccaggaaccactcctcattcccattgtcaaagtgactctgctggtgccgggcacaggcaatgaggttgcaggcttccacacaggcctggatggctggggcagcctgcttcaggctgccacagaactggctcagccctaactccgggcctttctctagcttctccagcgctgccgccaccagcccttgccgctgccactgctggaagaggagttcactgcgaggcaggcagagggccacctcctccccagttgtgatcgaccatcccgaggagccattctgtagccgggactgggtgtcctgcacagctgccggggccagcgggcgaacgtgcatcctcagcagctggggcaagagcctcaggaacaccttgcggacccctcgggccatggagtgtgtgtgtggagaccgcaaggagacattgagcacaaccacagcattcacgacaatgaggatggtcaccaccaggaggaaggtcaggtacttgctgatgagtggcaccgcctgggaggtttcaggcaccttcttggccacaaggaagaggaagacagtctgggccaggagcacgttgatggcgacggtacacttctggcccccagccttggcaggaaggaagtggatgaggatggcgacagaggagatgagcacacagggggcgatgatgttgatgacgtagaagaggggcttgcgctggatgagcaggtagaacaccaccttctggtggcctgcttcctgggctggcgccgctgggtccaggagcatcttggctggtcggtgctggatggcccactccccattctctgtgaaggcctcagggtcaatgaaaatccactcgatggtctggccatcttcctgactcagctgcagatcaatctcattggtgctgtaagtctgggactggaagataagggagcagttctgccagtcgaaggggaagtaggtgactgagatagagcaggcggaacggaagatggcaggcggcagccagtagatacagccgtcaggggacacgagcacattgcagtagagggccacctcgaagacaccgtccacgttgttctccagcacgatatccggccgccacaccatggtggacggcaccctcagcacccacaggccttcgtagtctcgcggatcccagcgcaggcgatagtcgcaccactgcatctctatccagacattggtggtgagggcttcctctcgctcgttcagggagatgaggttggtgagggttagcttcaggctgacattgaccacatccgagtctcgttccgcgggccgcaggttggggtcgtagttttgcatcaggtctgcgagcaggcgctcctcctggttccggccctgggcccccaggcagacagccagcagcagcaggaggagcagcggcccctggcccccatgcatggtgcctcagctctctgcagtgacaggggtgggacaacagctccaaggtctggggc

SEQ ID NO: 273 - RNA, 1921 nt, Mus musculus
  source 1..1921: mol_type = mRNA
agaactgaggcaccatgcaagggggccagagacctcagctcctcttgctgctgttggctgtctgcctgggggcccagagccgcaaccaagaggagcgtctgcttgcggacctgatgcgaaactacgacccccacctgcggccggctgagcgcgactcagatgtggtcaatgtcagcctgaagcttaccttgaccaacctcatctccctgaatgaacgagaggaggccctcacaactaacgtctggatagagatgcaatggtgcgactatcgcctgcgctgggacccaaaagactacgaaggcctgtggatattgagggtgccatctactatggtctggcggccagatatcgtcctggagaacaatgtggacggtgtcttcgaggtggctctctactgcaatgtcctcgtgtcccccgacggttgtatctactggctgccgcctgccatcttccgctcctcctgctccatctctgtcacctacttccccttcgattggcagaactgttccctcgtcttccaatcccagacttacagcaccagtgagatcaacttgcagctgagccaggaggatgggcaagccattgagtggatcttcattgacccggaggctttcacagagaatggggagtgggccatccggcaccgaccggctaaaatgctcctggactccgtggctcctgcagaggaggcgggccaccagaaggtggtgttctacctgcttatccagcgcaagcccctcttctacgtcatcaacatcatcgccccctgtgtgctcatctcctcagtcgccatcctcatctacttccttcctgctaaggcgggcgggcagaaatgcacagtggccaccaacgtgctcctggcccagactgtcttccttttccttgtggctaagaaggtgcctgagacctcccaggcagtgccactcatcagcaagtacctgaccttcctcatggtggtgaccatcctcatcgtcgtgaactctgtggtcgtgctcaatgtgtccttgcggtccccccacacacactccatggcccgtggggtccgcaaggtgttcctgaggctcctgccccagctgttacggatgcatgtgcgcccactagctccagctgctgtccaggatgcccggttccgactccagaatggctcttcctcagggtggcccatcatggctcgagaggaaggggacctctgtctgcctcgaagcgaactcctctttaggcaaaggcagcgcaatggattagtgcaggcagtattggagaagctagagaatggtccagaagtgaggcagagccaggagttctgtggcagcctgaagcaagcctccccagccatccaggcctgtgtggatgcctgtaacctcatggctcgtgcccgacgccagcagagtcactttgacagtgggaacgaggagtggttgctggtgggccgagtgctggaccgagtctgcttcctagccatgctctccctcttcatctgtggcactgctggcatcttcctcatggcccactacaaccaagtgcctgacctgccgttccccggagacccccgcccctacctgcctttgccagactgagccaaccaatccctcctgggccctggagtcagctatgagggccatgctgtttgtagagctgtatcccgtgttgatgctgagtgtgctcttggggaaatacccaaggcttcctgggagaagatagagaaataaagagacagagggggatttctgcagtggttggtgatgggtatggtcacatgactttgagcagttctgataggtcactttgaagccctaagagctctgcctttcctgatgtcattgactgggcaaggttttaccctttgaggcctgagaaaatttcctcctgccattttgtaagatttatttctattatttctaactatatgtatgtatgtacgtac

SEQ ID NO: 274 - RNA, 1921 nt, Mus musculus
  source 1..1921: mol_type = mRNA
gtacgtacatacatacatatagttagaaataatagaaataaatcttacaaaatggcaggaggaaattttctcaggcctcaaagggtaaaaccttgcccagtcaatgacatcaggaaaggcagagctcttagggcttcaaagtgacctatcagaactgctcaaagtcatgtgaccatacccatcaccaaccactgcagaaatccccctctgtctctttatttctctatcttctcccaggaagccttgggtatttccccaagagcacactcagcatcaacacgggatacagctctacaaacagcatggccctcatagctgactccagggcccaggagggattggttggctcagtctggcaaaggcaggtaggggcgggggtctccggggaacggcaggtcaggcacttggttgtagtgggccatgaggaagatgccagcagtgccacagatgaagagggagagcatggctaggaagcagactcggtccagcactcggcccaccagcaaccactcctcgttcccactgtcaaagtgactctgctggcgtcgggcacgagccatgaggttacaggcatccacacaggcctggatggctggggaggcttgcttcaggctgccacagaactcctggctctgcctcacttctggaccattctctagcttctccaatactgcctgcactaatccattgcgctgcctttgcctaaagaggagttcgcttcgaggcagacagaggtccccttcctctcgagccatgatgggccaccctgaggaagagccattctggagtcggaaccgggcatcctggacagcagctggagctagtgggcgcacatgcatccgtaacagctggggcaggagcctcaggaacaccttgcggaccccacgggccatggagtgtgtgtggggggaccgcaaggacacattgagcacgaccacagagttcacgacgatgaggatggtcaccaccatgaggaaggtcaggtacttgctgatgagtggcactgcctgggaggtctcaggcaccttcttagccacaaggaaaaggaagacagtctgggccaggagcacgttggtggccactgtgcatttctgcccgcccgccttagcaggaaggaagtagatgaggatggcgactgaggagatgagcacacagggggcgatgatgttgatgacgtagaagaggggcttgcgctggataagcaggtagaacaccaccttctggtggcccgcctcctctgcaggagccacggagtccaggagcattttagccggtcggtgccggatggcccactccccattctctgtgaaagcctccgggtcaatgaagatccactcaatggcttgcccatcctcctggctcagctgcaagttgatctcactggtgctgtaagtctgggattggaagacgagggaacagttctgccaatcgaaggggaagtaggtgacagagatggagcaggaggagcggaagatggcaggcggcagccagtagatacaaccgtcgggggacacgaggacattgcagtagagagccacctcgaagacaccgtccacattgttctccaggacgatatctggccgccagaccatagtagatggcaccctcaatatccacaggccttcgtagtcttttgggtcccagcgcaggcgatagtcgcaccattgcatctctatccagacgttagttgtgagggcctcctctcgttcattcagggagatgaggttggtcaaggtaagcttcaggctgacattgaccacatctgagtcgcgctcagccggccgcaggtgggggtcgtagtttcgcatcaggtccgcaagcagacgctcctcttggttgcggctctgggcccccaggcagacagccaacagcagcaagaggagctgaggtctctggcccccttgcatggtgcctcagttct

SEQ ID NO: 275 - RNA, 1832 nt, Rattus norvegicus
  source 1..1832: mol_type = mRNA
ctggtggggcctgatagagctggcagggttggctgggaggggcgtgtaggctgacacaggacactccaaccccccaaccccaagacctgtaaagctactgtcctactcatcactgggcagaactgaggcaccatgcacgggggccagggacctcagctcctcttgctgctgctggctacctgcctgggggcccagagccgcaaccaagaggagcggctgcttgcggacctgatgcgcaactacgacccccatctgcggccggctgagcgtgactcagatgtggttaatgtcagcctgaagcttaccttaaccaacctcatctcccttaatgagcgagaggaggccctcacgactaatgtctggatagaaatgcaatggtgcgactatcgcctacgctgggacccgaaagactacgaaggcctgtggatattgagggtgccatctaccatggtctggcagcccgatatcgtgctgggaaacaatgtggacggtgtcttcgaggtggcgctctactgcaatgtgctcgtgtcccctgatggttgtatctactggctgccgcctgccatcttccgctcctcctgctccatctctgtcacctacttccccttcgattggcagaactgctccctcgtcttccagtcccagacttacagcaccagcgagatcaacttgcagctgagccaggaggatgggcaagccattgagtggatcttcattgaccccgaggctttcacagagaatggggaatgggccatccggcatcgaccagccaaaatgctactggatcctgtgactccagcagaggaggcaggccaccagaaggtggtgttctacctgctcatccaacgcaagcccctcttctatgtcatcaacatcatcgtcccctgtgtgctcatctcctcagttgcgatcctcatctacttccttcctgccaaggcgggcggccagaagtgcacagtggccaccaacgtgctcctggcccagaccgtcttccttttcctcgtggctaagaaggtgcctgagacctcccaggcagtgccgctcatcagcaagtacctgaccttcctcatggtggtgaccatcctcatcgttgtgaactctgtggtcgtgctcaatgtgtccttgaggtccccacacacacactccatggcccggggggtccgcaaggtgtttttgaggctcctgccccagctgttacggatgcatgtgcatcctcgggctcctgctgctgtccaggatgcccggctgcgactccagaatggctcttcctcagggtggcccatcatgactcgagaggaaggggacctctgtttgcctcgaagcgaactcctctttaggcaaaggcagcgcaatggattggtgcaggcagtactggagaagttagagaatggtccagaaatgaggcagagccaggagttctgtggcagcctgaagcaagcctccccggccatccaggcctgtgtggatgcctgtaacctcatggcgcgtgcccgacaccagcaaagtcactttgacagtgggaatgaggagtggttgctggtgggccgagtgctggaccgagtctgtttcctagccatgctctccctcttcatctgcggcactgctggcatcttcctcatggcccactacaaccaggtgcctgacctgccattccctggagacccccgcccctacttgcctttgccagactgagccaaccaatcactcctgcgccctggagtcagccatgtgggtcatgctgtttatggagctgtattctctgttgatcctgatgggctcctggggagcaatcattcttgggagaagatagaggaataaaggaataggaataa

SEQ ID NO: 276 - RNA, 1832 nt, Rattus norvegicus
  source 1..1832: mol_type = mRNA
ttattcctattcctttattcctctatcttctcccaagaatgattgctccccaggagcccatcaggatcaacagagaatacagctccataaacagcatgacccacatggctgactccagggcgcaggagtgattggttggctcagtctggcaaaggcaagtaggggcgggggtctccagggaatggcaggtcaggcacctggttgtagtgggccatgaggaagatgccagcagtgccgcagatgaagagggagagcatggctaggaaacagactcggtccagcactcggcccaccagcaaccactcctcattcccactgtcaaagtgactttgctggtgtcgggcacgcgccatgaggttacaggcatccacacaggcctggatggccggggaggcttgcttcaggctgccacagaactcctggctctgcctcatttctggaccattctctaacttctccagtactgcctgcaccaatccattgcgctgcctttgcctaaagaggagttcgcttcgaggcaaacagaggtccccttcctctcgagtcatgatgggccaccctgaggaagagccattctggagtcgcagccgggcatcctggacagcagcaggagcccgaggatgcacatgcatccgtaacagctggggcaggagcctcaaaaacaccttgcggaccccccgggccatggagtgtgtgtgtggggacctcaaggacacattgagcacgaccacagagttcacaacgatgaggatggtcaccaccatgaggaaggtcaggtacttgctgatgagcggcactgcctgggaggtctcaggcaccttcttagccacgaggaaaaggaagacggtctgggccaggagcacgttggtggccactgtgcacttctggccgcccgccttggcaggaaggaagtagatgaggatcgcaactgaggagatgagcacacaggggacgatgatgttgatgacatagaagaggggcttgcgttggatgagcaggtagaacaccaccttctggtggcctgcctcctctgctggagtcacaggatccagtagcattttggctggtcgatgccggatggcccattccccattctctgtgaaagcctcggggtcaatgaagatccactcaatggcttgcccatcctcctggctcagctgcaagttgatctcgctggtgctgtaagtctgggactggaagacgagggagcagttctgccaatcgaaggggaagtaggtgacagagatggagcaggaggagcggaagatggcaggcggcagccagtagatacaaccatcaggggacacgagcacattgcagtagagcgccacctcgaagacaccgtccacattgtttcccagcacgatatcgggctgccagaccatggtagatggcaccctcaatatccacaggccttcgtagtctttcgggtcccagcgtaggcgatagtcgcaccattgcatttctatccagacattagtcgtgagggcctcctctcgctcattaagggagatgaggttggttaaggtaagcttcaggctgacattaaccacatctgagtcacgctcagccggccgcagatgggggtcgtagttgcgcatcaggtccgcaagcagccgctcctcttggttgcggctctgggcccccaggcaggtagccagcagcagcaagaggagctgaggtccctggcccccgtgcatggtgcctcagttctgcccagtgatgagtaggacagtagctttacaggtcttggggttggggggttggagtgtcctgtgtcagcctacacgcccctcccagccaaccctgccagctctatcaggccccaccag

SEQ ID NO: 277 - RNA, 2338 nt, Macaca fascicularis
  source 1..2338: mol_type = mRNA
tgacacccagagcccgtctctctctgccccagaccttggagctgttgtcccacccatcactgcagagagccgaggcgccatgcatgggggccaggggctgctgctcctcctgccgctgctggctgtctgcctgggggtccagggccggaatcaggaggagcgcctgctcgcagacctgatgcaaaactacgaccccaacctgcgacctgcggaacgagactcggatgtggtcaacgtcagcctgaagctaaccctcaccaacctcatctccctgaacgagcgagaggaagccctcaccaccaacgtctggatagagatgcagtggtgtgactatcgcctgcgctgggatccgcgagactacgaaggcctgtgggtgctgagggtgccgtccaccatggtgtggcggccggatatcgtgctggagaacaacgtggacggtgtcttcgaggtggccctctactgcaatgtgctcgtgtcccctgacggctgtatctactggctgccgcccgccatcttccgttccgcctgctctatctcagtcacctacttccccttcgactggcagaactgctcccttatcttccagtcccagacttacagcaccaatgagattgatctgcagctgagtcaggaagatggccagaccatcgagtggattttcattgaccctgaggccttcacagagaatggggagtgggccatccagcaccgaccagccaagatgctcctggacccagcggcaccagcccaggaggcaggccaccagaaggtggtgttctacctgctcatccagcgcaagcccctcttctacatcatcaacatcatcgccccctgcgtgctcatctcctccgttgccatcctcatctacttccttcctgccaaggctgggggccagaagtgtaccgtcgccatcaacgtgctcctggcccagactgtcttccttttccttgtggccaagaaggtgcctgaaacctcccaggcggtgccactcattagcaagtacctgaccttcctcctggtggtgaccatcctcattgtcgtgaatgctgtggtcgtgctcaacgtgtccttgcggtccccacacacacactccatggcccaaggggtccgcaaggtgttcctgaggctcttgccccagctgctgaggatgcacgttcgcccgctggccccggcagctgtgcaggacacccagccccggctacagaatggctcctcgggatggtcgatcacaactggggaggtggccctctgcctgcctcgcagtgaactcctcttccagcagtggcagcagcaagggctggtggcagcagcgctggagaagctagagaaaggcccggagttagagccgagccagttctgtggcagcctgaagcaggctgcgccagccatccaggcctgcgtggaagcctgcaacctcattgcccgtgcccggcaccagcagagtcactttgacaatgggaatgaggagtggttcctggtgggccgagtgttggaccgcgtctgcttcctggccatgctctcgctcttcgtctgtggcacggctggcatcttcctcatggcccactacaaccgggtgccagccctgccattccctggagatccacgctcctacctgccctcaccagactgagccaaccaaccaccgcggggcatgtgggagtcacacacgtgggtcacactgagtcttatcagccacgttctcctactgaggtcctaagtgtactctttgggaagtgcccttcagggctgtgtgagccaaacagccctaagaaaagctggggaaagggtctgagctggagtccgggagtggttgggggtaggctctggttagtgtgctgctgcggtcagcatgcgtgcaggactggctagcttgtcctggcaatagctgctcctccactcagcgcactcccctcacttaggccaagcattattcattcccatcaatctgaagtccaaaggactgttttgtgtaataccttcgggcttgggactggctccctttttacaagttctccctgaaagagggcagtcaagagaggtgtgaagagtagcggccaatgatctctccaaagcagggcagcagcccatgccagctggcatctccccactgtgccttctgggtacaataagcacccaattctcaaaagccccagtggcctttccattcatgtgcatttttctaccactgaccacaagacaatttcctgagttttgtaatccttttttttttttagtttttgatgtgttgttgttgttttgtttagttttgagacagagcctcactcttgtcatgcaagctagagtggagtggcatgatcaaagctcactgcagcctcaa

SEQ ID NO: 278 - RNA, 2338 nt, Macaca fascicularis
  source 1..2338: mol_type = mRNA
ttgaggctgcagtgagctttgatcatgccactccactctagcttgcatgacaagagtgaggctctgtctcaaaactaaacaaaacaacaacaacacatcaaaaactaaaaaaaaaaaaggattacaaaactcaggaaattgtcttgtggtcagtggtagaaaaatgcacatgaatggaaaggccactggggcttttgagaattgggtgcttattgtacccagaaggcacagtggggagatgccagctggcatgggctgctgccctgctttggagagatcattggccgctactcttcacacctctcttgactgccctctttcagggagaacttgtaaaaagggagccagtcccaagcccgaaggtattacacaaaacagtcctttggacttcagattgatgggaatgaataatgcttggcctaagtgaggggagtgcgctgagtggaggagcagctattgccaggacaagctagccagtcctgcacgcatgctgaccgcagcagcacactaaccagagcctacccccaaccactcccggactccagctcagaccctttccccagcttttcttagggctgtttggctcacacagccctgaagggcacttcccaaagagtacacttaggacctcagtaggagaacgtggctgataagactcagtgtgacccacgtgtgtgactcccacatgccccgcggtggttggttggctcagtctggtgagggcaggtaggagcgtggatctccagggaatggcagggctggcacccggttgtagtgggccatgaggaagatgccagccgtgccacagacgaagagcgagagcatggccaggaagcagacgcggtccaacactcggcccaccaggaaccactcctcattcccattgtcaaagtgactctgctggtgccgggcacgggcaatgaggttgcaggcttccacgcaggcctggatggctggcgcagcctgcttcaggctgccacagaactggctcggctctaactccgggcctttctctagcttctccagcgctgctgccaccagcccttgctgctgccactgctggaagaggagttcactgcgaggcaggcagagggccacctccccagttgtgatcgaccatcccgaggagccattctgtagccggggctgggtgtcctgcacagctgccggggccagcgggcgaacgtgcatcctcagcagctggggcaagagcctcaggaacaccttgcggaccccttgggccatggagtgtgtgtgtggggaccgcaaggacacgttgagcacgaccacagcattcacgacaatgaggatggtcaccaccaggaggaaggtcaggtacttgctaatgagtggcaccgcctgggaggtttcaggcaccttcttggccacaaggaaaaggaagacagtctgggccaggagcacgttgatggcgacggtacacttctggcccccagccttggcaggaaggaagtagatgaggatggcaacggaggagatgagcacgcagggggcgatgatgttgatgatgtagaagaggggcttgcgctggatgagcaggtagaacaccaccttctggtggcctgcctcctgggctggtgccgctgggtccaggagcatcttggctggtcggtgctggatggcccactccccattctctgtgaaggcctcagggtcaatgaaaatccactcgatggtctggccatcttcctgactcagctgcagatcaatctcattggtgctgtaagtctgggactggaagataagggagcagttctgccagtcgaaggggaagtaggtgactgagatagagcaggcggaacggaagatggcgggcggcagccagtagatacagccgtcaggggacacgagcacattgcagtagagggccacctcgaagacaccgtccacgttgttctccagcacgatatccggccgccacaccatggtggacggcaccctcagcacccacaggccttcgtagtctcgcggatcccagcgcaggcgatagtcacaccactgcatctctatccagacgttggtggtgagggcttcctctcgctcgttcagggagatgaggttggtgagggttagcttcaggctgacgttgaccacatccgagtctcgttccgcaggtcgcaggttggggtcgtagttttgcatcaggtctgcgagcaggcgctcctcctgattccggccctggacccccaggcagacagccagcagcggcaggaggagcagcagcccctggcccccatgcatggcgcctcggctctctgcagtgatgggtgggacaacagctccaaggtctggggcagagagagacgggctctgggtgtca

SEQ ID NO: 279 - RNA, 2301 nt, Macaca mulatta
  source 1..2301: mol_type = mRNA
cacccagagcccatctctctctgccccagaccttggagctgttgtcccacccatcactgcagagagctgaggcgccatgcatgggggccaggggctgctgctcctcctgccgctgctggctgtctgcctgggtaggacacaaaggaatctcagcctaaggagggtccagggccggaatcaggaggagcgcctgctcgcagacctgatgcaaaactacgaccccaacctgcgacctgcggaacgagactcggatgtggtcaacgtcagcctgaagctaaccctcaccaacctcatctccctgaacgagcgagaggaagccctcaccaccaacgtctggatagagatgcagtggtgcgactatcgcctgcgctgggatccgcgagactacgaaggcctgtgggtgctgagggtgccgtccaccatggtgtggcggccggatatcgtgctggagaacaacgtggacggtgtcttcgaggtggccctctactgcaatgtgctcgtgtcccctgacggctgtatctactggctgccgcctgccatcttccgttccgcctgctctatctcagtcacctacttccccttcgactggcagaactgctcccttatcttccagtcccagacttacagcaccaatgagattgatctgcagctgagtcaggaagatggccagaccatcgagtggattttcattgaccctgaggccttcacagagaatggggagtgggccatccagcaccgaccagccaagatgctcctggacccagcggcaccagcccaggaggcaggccaccagaaggtggtgttctacctgctcatccagcgcaagcccctcttctacgtcatcaacatcatcgccccctgcgtgctcatctcctccgtcgccatcctcatctacttccttcctgccaaggctgggggccagaagtgtaccgtcgccatcaacgtgctcctggcccagactgtcttccttttccttgtggccaagaaggtgcctgaaacctcccaggcggtgccactcattagcaagtacctgaccttcctcctggtggtgaccatcctcattgtcgtgaatgctgtggtcgtgctcaacgtgtccttgcggtccccacacacacactccatggcccaaggggtccgcaaggtgttcctgaggctcttgccccagctgctgaggatgcacgttcgcccgctggccccggcagctgtgcaggacacccagccccggctacagaatggctcctcgggatggtcgatcacaactggggaggtggccctctgcctgcctcgcagtgaactcctcttccagcagtggcagcagcaagggctggtggcagcagcgctggagaagctagagaaaggcccggagttagagccgagccagttctgtggcagcctgaagcaggctgcgccagccatccaggcctgcgtggaagcctgcaacctcattgcccgtgcccggcaccagcagagtcactttgacaatgggaatgaggagtggttcctggtgggccgagtgctggaccgcgtctgcttcctggccatgctctcgctcttcgtctgtggcacggctggcatcttcctcatggcccactacaaccgggtgccagccctgccattccctggagatccacgctcctacctgccctcaccagactgagccaaccaaccacctcggggcatgtgggagtcacacacgtgggtcacactgagtcttatcagccacgttctcctactgaggtcctaagtgtactctttgggaagtgcccttcagggctgtgtgagccaaacagccctaagaaaagctggggaaagagtctgagctggagtccgggagtggttgggggtgggctgtggttagtgtgctgctgcggtcagcatgcgtgcaggactggctagcttgtcctggcaatagctgctcctccactcagcgcactcccctcacttaggccaagcattattcattcccatcaatctgaagtccaaaggactgttttgtgtaataccttcgggcttgggactggctccctttttacaagttctccctgaaagagggcagtcaagagaggtgtgaagagtagcggccaatgatctctccaaagcagggcagcagcccatgccagctggcatctccccactgtgccttctgggtacaataagcacccaattctcaaaagccccagtggcctttccattcatgtgcatttttctaccactgaccacaagacaatttcctgagttttgtaatcctttttatttttagtttttgatgtgttgttgttgttttgtttagttttgagacag

SEQ ID NO: 280 - RNA, 2301 nt, Macaca mulatta
  source 1..2301: mol_type = mRNA
ctgtctcaaaactaaacaaaacaacaacaacacatcaaaaactaaaaataaaaaggattacaaaactcaggaaattgtcttgtggtcagtggtagaaaaatgcacatgaatggaaaggccactggggcttttgagaattgggtgcttattgtacccagaaggcacagtggggagatgccagctggcatgggctgctgccctgctttggagagatcattggccgctactcttcacacctctcttgactgccctctttcagggagaacttgtaaaaagggagccagtcccaagcccgaaggtattacacaaaacagtcctttggacttcagattgatgggaatgaataatgcttggcctaagtgaggggagtgcgctgagtggaggagcagctattgccaggacaagctagccagtcctgcacgcatgctgaccgcagcagcacactaaccacagcccacccccaaccactcccggactccagctcagactctttccccagcttttcttagggctgtttggctcacacagccctgaagggcacttcccaaagagtacacttaggacctcagtaggagaacgtggctgataagactcagtgtgacccacgtgtgtgactcccacatgccccgaggtggttggttggctcagtctggtgagggcaggtaggagcgtggatctccagggaatggcagggctggcacccggttgtagtgggccatgaggaagatgccagccgtgccacagacgaagagcgagagcatggccaggaagcagacgcggtccagcactcggcccaccaggaaccactcctcattcccattgtcaaagtgactctgctggtgccgggcacgggcaatgaggttgcaggcttccacgcaggcctggatggctggcgcagcctgcttcaggctgccacagaactggctcggctctaactccgggcctttctctagcttctccagcgctgctgccaccagcccttgctgctgccactgctggaagaggagttcactgcgaggcaggcagagggccacctccccagttgtgatcgaccatcccgaggagccattctgtagccggggctgggtgtcctgcacagctgccggggccagcgggcgaacgtgcatcctcagcagctggggcaagagcctcaggaacaccttgcggaccccttgggccatggagtgtgtgtgtggggaccgcaaggacacgttgagcacgaccacagcattcacgacaatgaggatggtcaccaccaggaggaaggtcaggtacttgctaatgagtggcaccgcctgggaggtttcaggcaccttcttggccacaaggaaaaggaagacagtctgggccaggagcacgttgatggcgacggtacacttctggcccccagccttggcaggaaggaagtagatgaggatggcgacggaggagatgagcacgcagggggcgatgatgttgatgacgtagaagaggggcttgcgctggatgagcaggtagaacaccaccttctggtggcctgcctcctgggctggtgccgctgggtccaggagcatcttggctggtcggtgctggatggcccactccccattctctgtgaaggcctcagggtcaatgaaaatccactcgatggtctggccatcttcctgactcagctgcagatcaatctcattggtgctgtaagtctgggactggaagataagggagcagttctgccagtcgaaggggaagtaggtgactgagatagagcaggcggaacggaagatggcaggcggcagccagtagatacagccgtcaggggacacgagcacattgcagtagagggccacctcgaagacaccgtccacgttgttctccagcacgatatccggccgccacaccatggtggacggcaccctcagcacccacaggccttcgtagtctcgcggatcccagcgcaggcgatagtcgcaccactgcatctctatccagacgttggtggtgagggcttcctctcgctcgttcagggagatgaggttggtgagggttagcttcaggctgacgttgaccacatccgagtctcgttccgcaggtcgcaggttggggtcgtagttttgcatcaggtctgcgagcaggcgctcctcctgattccggccctggaccctccttaggctgagattcctttgtgtcctacccaggcagacagccagcagcggcaggaggagcagcagcccctggcccccatgcatggcgcctcagctctctgcagtgatgggtgggacaacagctccaaggtctggggcagagagagatgggctctgggtg

SEQ ID NO: 281 - RNA, 3115 nt, Homo sapiens
  source 1..3115: mol_type = mRNA
atccgatccgtgccgccgcagggagtgtgtcaagttacagaggcgccggaatcggcccctgcgctcctcgccagccgccacgacccacctctgcccatggggccctccgtgtgcgccccttcgcccggggactgaaactgactggcccgggagacacgaggcgcccagaaggactgacagcgcggcaccaactgctctgcagacacttgaagggaaagactgggcggagagaaggagagccggtcagattcccctaactttcctggacttggaacgttcttcgaaataacttttttctcacctaggtgtaccccaattaccgctggttgtgctttttcggcacttcctctcctactgctaatttttccgtcctctttgccgggagcagcggaaagggacgttttccagcgatacaagccctttccccctgccccgcagtttggatagagccttttggcagcggctgtcgcctttatttattctatttatttatttattggttctcaagacgcgagaggatggtagcggagcgcacccacaaagcggcagccaccggtgcccgcggccctggggagttgggcgcgcccgggacggtggctctggtggcggcgcgggcggagcgcggcgcacggctgccgagtccagggtcgtgcgggctgctgacgctggccctctgctcgctggcactcagcctgctcgcccactttcggacggccgagctgcaggcccgggtgctgcgcctggaagcggagcgcggggagcagcaaatggagacggctattttgggacgagtcaatcaactgctggacgagaaatggaagctccactcaaggaggcgccgggaggccccaaagacatctccaggatgtaactgcccaccaggacctcctggtcccactggaagacccggactcccaggggacaaaggtgccattgggatgcctggacgtgtggggtcccccggagacgctgggctgtccatcattggtccccgcggcccccctggtcaaccaggaactagaggtttccctggatttccgggtcccattgggctggacggcaaaccgggccacccaggaccaaagggcgacatgggtctgacgggtcccccaggacagccgggaccccagggacaaaaaggagaaaagggtcagtgtggagagtacccacaccgggagtgcctaagcagcatgccagcagctctgcgctccagccaaataattgccctgaagctgctgcctctcctcaattcagtgcgactggctccacccccggtcataaaaaggcggacgttccagggcgaacagagccaggccagcatccaaggtccaccagggcccccaggcccccctggaccaagtggacctctggggcacccaggactgccagggcctatggggccacctggcttacctgggcctcctggaccaaagggagacccagggatccagggctaccacggccggaagggagaacggggcatgccagggatgccaggcaagcatggagccaagggggcgcccggaattgccgtggctgggatgaagggtgagccagggatcccaggaaccaagggtgagaagggggctgaaggctcccctgggcttcctggcctcctggggcagaagggagagaaaggcgatgctggcaactccattggaggaggcagaggggaacctggccctccagggctccctgggcccccagggccaaagggagaagcaggtgtcgatggccaggttggccccccagggcagccaggagacaagggggagcgtggagcagctggagaacagggaccagatggccccaagggctccaagggagaaccagggaaaggagagatggtggattacaatggaaacatcaatgaggctctccaggagatccggacgctggccttgatggggcctcctggtcttcctgggcaaattggcccacctggagctccagggattccaggccagaagggggagattggactgccaggccctccaggacacgatggggaaaagggacctcgcggtaaaccaggagacatgggccctcctggtccccaaggccccccaggaaaggatggacctccaggagtgaagggagaaaacgggcacccagggagcccaggagagaagggggaaaaaggggagacaggacaagcaggctcaccgggagagaaaggagaagccggggagaagggcaatccaggagcagaggttcctgggctgccagggccagaggggcctcccggacctccggggctccaaggtgttcctggaccaaagggggaagcaggactagatggagcaaaaggagagaaaggcttccagggagaaaaaggagaccgtggtcccctgggactacccggagcttcaggtttggacggcaggcctgggccaccgggtactccaggaccaattggagttccaggcccagcgggaccaaagggcgagaggggcagcaaaggagaccctgggatgacaggaccaacgggagcagctgggcttcctggtttacatggaccacccggggacaagggaaaccggggggagagggggaagaaaggctctagagggcctaaaggggataagggagaccaaggagcgcctggattagatgccccctgcccattgggcgaagatggcttaccagtccaaggctgctggaacaagtgatgcctctaaccttggattggcctgtgtgtgtgtttgtacatagaatatttatttttatacagttttcactttttgaaaatgccagaagtatgatgcatcttacagattattaaaaaagaaagaaaaacctgcatattttgtacagaaaatatcaacctcttcccttttgtttacaagatgttttgtataagcctatgtctctaatacattttttgtttggtcgtaatgtctgcatgatatttgtgcacatttattaagtatcgaagcttaataaattattgtgtcctggtgccaaagggggccagccagaactgaggtgctggctagctcatgtgtgaattcacataaatgtagaggtccatgatatttgctaagctaggtgtgtctaagagtattttaaacccttatggattttcattattaaaggaaatgaaacatggcaa

SEQ ID NO: 282 - RNA, 3115 nt, Homo sapiens
  source 1..3115: mol_type = mRNA
ttgccatgtttcatttcctttaataatgaaaatccataagggtttaaaatactcttagacacacctagcttagcaaatatcatggacctctacatttatgtgaattcacacatgagctagccagcacctcagttctggctggccccctttggcaccaggacacaataatttattaagcttcgatacttaataaatgtgcacaaatatcatgcagacattacgaccaaacaaaaaatgtattagagacataggcttatacaaaacatcttgtaaacaaaagggaagaggttgatattttctgtacaaaatatgcaggtttttctttcttttttaataatctgtaagatgcatcatacttctggcattttcaaaaagtgaaaactgtataaaaataaatattctatgtacaaacacacacacaggccaatccaaggttagaggcatcacttgttccagcagccttggactggtaagccatcttcgcccaatgggcagggggcatctaatccaggcgctccttggtctcccttatcccctttaggccctctagagcctttcttccccctctccccccggtttcccttgtccccgggtggtccatgtaaaccaggaagcccagctgctcccgttggtcctgtcatcccagggtctcctttgctgcccctctcgccctttggtcccgctgggcctggaactccaattggtcctggagtacccggtggcccaggcctgccgtccaaacctgaagctccgggtagtcccaggggaccacggtctcctttttctccctggaagcctttctctccttttgctccatctagtcctgcttccccctttggtccaggaacaccttggagccccggaggtccgggaggcccctctggccctggcagcccaggaacctctgctcctggattgcccttctccccggcttctcctttctctcccggtgagcctgcttgtcctgtctcccctttttcccccttctctcctgggctccctgggtgcccgttttctcccttcactcctggaggtccatcctttcctggggggccttggggaccaggagggcccatgtctcctggtttaccgcgaggtcccttttccccatcgtgtcctggagggcctggcagtccaatctcccccttctggcctggaatccctggagctccaggtgggccaatttgcccaggaagaccaggaggccccatcaaggccagcgtccggatctcctggagagcctcattgatgtttccattgtaatccaccatctctcctttccctggttctcccttggagcccttggggccatctggtccctgttctccagctgctccacgctcccccttgtctcctggctgccctggggggccaacctggccatcgacacctgcttctccctttggccctgggggcccagggagccctggagggccaggttcccctctgcctcctccaatggagttgccagcatcgcctttctctcccttctgccccaggaggccaggaagcccaggggagccttcagcccccttctcacccttggttcctgggatccctggctcacccttcatcccagccacggcaattccgggcgcccccttggctccatgcttgcctggcatccctggcatgccccgttctcccttccggccgtggtagccctggatccctgggtctccctttggtccaggaggcccaggtaagccaggtggccccataggccctggcagtcctgggtgccccagaggtccacttggtccaggggggcctgggggccctggtggaccttggatgctggcctggctctgttcgccctggaacgtccgcctttttatgaccgggggtggagccagtcgcactgaattgaggagaggcagcagcttcagggcaattatttggctggagcgcagagctgctggcatgctgcttaggcactcccggtgtgggtactctccacactgacccttttctcctttttgtccctggggtcccggctgtcctgggggacccgtcagacccatgtcgccctttggtcctgggtggcccggtttgccgtccagcccaatgggacccggaaatccagggaaacctctagttcctggttgaccaggggggccgcggggaccaatgatggacagcccagcgtctccgggggaccccacacgtccaggcatcccaatggcacctttgtcccctgggagtccgggtcttccagtgggaccaggaggtcctggtgggcagttacatcctggagatgtctttggggcctcccggcgcctccttgagtggagcttccatttctcgtccagcagttgattgactcgtcccaaaatagccgtctccatttgctgctccccgcgctccgcttccaggcgcagcacccgggcctgcagctcggccgtccgaaagtgggcgagcaggctgagtgccagcgagcagagggccagcgtcagcagcccgcacgaccctggactcggcagccgtgcgccgcgctccgcccgcgccgccaccagagccaccgtcccgggcgcgcccaactccccagggccgcgggcaccggtggctgccgctttgtgggtgcgctccgctaccatcctctcgcgtcttgagaaccaataaataaataaatagaataaataaaggcgacagccgctgccaaaaggctctatccaaactgcggggcagggggaaagggcttgtatcgctggaaaacgtccctttccgctgctcccggcaaagaggacggaaaaattagcagtaggagaggaagtgccgaaaaagcacaaccagcggtaattggggtacacctaggtgagaaaaaagttatttcgaagaacgttccaagtccaggaaagttaggggaatctgaccggctctccttctctccgcccagtctttcccttcaagtgtctgcagagcagttggtgccgcgctgtcagtccttctgggcgcctcgtgtctcccgggccagtcagtttcagtccccgggcgaaggggcgcacacggagggccccatgggcagaggtgggtcgtggcggctggcgaggagcgcaggggccgattccggcgcctctgtaacttgacacactccctgcggcggcacggatcggat

SEQ ID NO: 283 - RNA, 3164 nt, Mus musculus
  source 1..3164: mol_type = mRNA
ggctgtgtcaagttacagaggcgccagaatcggccccagcgcggctcactgcagccacgacccacctctgcccatggggccctgcatgcgtgccccttcgcccggggactgacacccgttctccccggagacacaaaacacccagaaggaccccgagcgtcgcaccagcccgagaactctgcagaagagagaagggaaagagtggggagcggggccagatccccgaacttggaacattcttcgaaataacttttttcttactttggcgtactccgatcgcgtctgctggtggctcttggctgctcccgactccgactgctcattttcggtcctctttggcgagcaaaggaaagggacgtcctctagccacgttaaccccctttccccttgcctctcagtttggatcgcgcctcttggatctcgtttttatttattctatttatttatttattggctctcaagacgcgagggcatggtggcggagcgcacccgcaaagcggcagcctctggcagccgcggccctggggagctgggcgctccggggcccgggacagtggcgctggctgagcagtgcgctaggctgccgagccccgggtgctgcggactgctggctctagcgctgtgttcgctggcgctcagcctgctcgcccactttcggaccgcggagctgcaggcccgggtgctgcgcttggaagcagagcgcggggagcagcagatggagaaagctattttgggacgagtcaaccaactgctggacgagaaatggaagttctactcgcgtaggcgccgggaagccccgaagatgtctccaggatgtaactgcccaccaggacctcctggtcccactggaagacctggactcccaggggacaagggtgccatcgggatgcctggacgtgtgggtatcaaaggtcaaccaggcgagaagggtgcccctggagatgcggggatgtccatcgtcgggcctcgaggcccccctggccagcctggtacccgaggtttccctggattcccgggtcccattggtcttgacggcaggccgggccaccccggacctaaaggggagatgggcctggtgggtcctcgaggacaaccgggacctcagggacaaaagggagaaaagggtcagtgtggagagtacccacacagggagtacccaggcggcatgctagcagctctgcgctccaacccgataatgtccctaaagctgttgcctctactcaattcagtgcggctggctccacccccagtcattaaaaggcggacctttcagggggaacaaagtcagactggcatccaaggccctccagggccaccgggccccccaggaccaagtggccctctgggacacccaggactgccagggcctatagggccacctggtttaccggggcctcctggaccaaagggagacccagggatccagggctatcatggccgcaagggagagcggggcatgccaggaatgccaggcaagcacggagccaagggggttcctgggattgccgtggctgggatgaagggtgagccagggacgccaggaaccaagggtgagaagggtgcagcaggctcccctggcctcctggggcagaagggagaaaaaggtgatgctggcaatgccatcggaggaggcaggggggagcctggccccccggggctccctgggccccctgggccaaagggagaagctggtgttgatggccaggctgggcccccaggacagcaaggagacaaggggcagccaggagcagctggtgaacagggaccctctggccccaagggtgccaagggtgaacccggcaaaggagagatggtggattataatggcagcatcaacgaggcgcttcaggagatcaggacgctggccttgatggggcctcctggtcttcctggacaaacaggcccacccggacctccagggactccaggccaaaggggggagattggactgccaggccctccaggacacgatggggacaaggggcctcgaggaaaaccaggagatatggggccggctggtcctcaaggacccccaggaaaggatgggcctccaggaatgaagggagaagtcggacccccaggaagtccaggggagaaaggggagacaggacaagcaggcccccagggtctagacggcccaactggggagaaaggagaaccaggtgacgaagggaggcctggagcgacaggattgcctgggcccatcgggctcccgggattcacaggagagaaaggagaagctggggagaaaggcgacccgggagcagaggttcctgggccgccagggccagagggtcctccaggacctccgggcctccaaggttttcctggaccaaagggagaagcaggcctagagggcagtaaaggagagaagggctcccagggagaaaaaggagaccgggggcctctgggattgcctggtactccaggaccaatcggggttccaggcccagccggaccaaagggcgaaaggggcagcaaaggcgacccagggatgacgggaccaacgggagcagctgggctgcctggtttacatggaccacccggggacaaaggaaaccggggggagagggggaagaagggctctagagggcctaaaggggacaagggggaccaaggagcacctggactagacgccccctgcccgctgggagaagatggcttaccagtccaaggctgctggaacaagtgatgcctctaacctgggactggcctgtgtgtgtttgtatataggatatttatttttatacagttttcaccttttgaaaatgcccaaactatgatgcatcttacagatcattaagaaagaaagaagaaaagcctgcagattttgtacaggaaataacccctttccctttttgtttacaagacatttttgtataaatctgtttctaatacactttctgtctgtgcgtctgctcctaatgttgcatgatatttgtgcacacttactaaatatcacagcttcataaattattgtgttccagtgccaaagggggcccaccagcacagaggtgctgtgagcttgtgtgtgaattcacacacacacacaaaaaaagtggaggtcggtggtgtttgccagactacatgtgtctgacaatattttacattttaactgacggtcattattataagaaaaaaataataaaacgtggcaattcatg

SEQ ID NO: 284 - RNA, 3164 nt, Mus musculus
  source 1..3164: mol_type = mRNA
catgaattgccacgttttattatttttttcttataataatgaccgtcagttaaaatgtaaaatattgtcagacacatgtagtctggcaaacaccaccgacctccactttttttgtgtgtgtgtgtgaattcacacacaagctcacagcacctctgtgctggtgggccccctttggcactggaacacaataatttatgaagctgtgatatttagtaagtgtgcacaaatatcatgcaacattaggagcagacgcacagacagaaagtgtattagaaacagatttatacaaaaatgtcttgtaaacaaaaagggaaaggggttatttcctgtacaaaatctgcaggcttttcttctttctttcttaatgatctgtaagatgcatcatagtttgggcattttcaaaaggtgaaaactgtataaaaataaatatcctatatacaaacacacacaggccagtcccaggttagaggcatcacttgttccagcagccttggactggtaagccatcttctcccagcgggcagggggcgtctagtccaggtgctccttggtcccccttgtcccctttaggccctctagagcccttcttccccctctccccccggtttcctttgtccccgggtggtccatgtaaaccaggcagcccagctgctcccgttggtcccgtcatccctgggtcgcctttgctgcccctttcgccctttggtccggctgggcctggaaccccgattggtcctggagtaccaggcaatcccagaggcccccggtctcctttttctccctgggagcccttctctcctttactgccctctaggcctgcttctccctttggtccaggaaaaccttggaggcccggaggtcctggaggaccctctggccctggcggcccaggaacctctgctcccgggtcgcctttctccccagcttctcctttctctcctgtgaatcccgggagcccgatgggcccaggcaatcctgtcgctccaggcctcccttcgtcacctggttctcctttctccccagttgggccgtctagaccctgggggcctgcttgtcctgtctcccctttctcccctggacttcctgggggtccgacttctcccttcattcctggaggcccatcctttcctgggggtccttgaggaccagccggccccatatctcctggttttcctcgaggccccttgtccccatcgtgtcctggagggcctggcagtccaatctcccccctttggcctggagtccctggaggtccgggtgggcctgtttgtccaggaagaccaggaggccccatcaaggccagcgtcctgatctcctgaagcgcctcgttgatgctgccattataatccaccatctctcctttgccgggttcacccttggcacccttggggccagagggtccctgttcaccagctgctcctggctgccccttgtctccttgctgtcctgggggcccagcctggccatcaacaccagcttctccctttggcccagggggcccagggagccccggggggccaggctcccccctgcctcctccgatggcattgccagcatcacctttttctcccttctgccccaggaggccaggggagcctgctgcacccttctcacccttggttcctggcgtccctggctcacccttcatcccagccacggcaatcccaggaacccccttggctccgtgcttgcctggcattcctggcatgccccgctctcccttgcggccatgatagccctggatccctgggtctccctttggtccaggaggccccggtaaaccaggtggccctataggccctggcagtcctgggtgtcccagagggccacttggtcctggggggcccggtggccctggagggccttggatgccagtctgactttgttccccctgaaaggtccgccttttaatgactgggggtggagccagccgcactgaattgagtagaggcaacagctttagggacattatcgggttggagcgcagagctgctagcatgccgcctgggtactccctgtgtgggtactctccacactgacccttttctcccttttgtccctgaggtcccggttgtcctcgaggacccaccaggcccatctcccctttaggtccggggtggcccggcctgccgtcaagaccaatgggacccgggaatccagggaaacctcgggtaccaggctggccaggggggcctcgaggcccgacgatggacatccccgcatctccaggggcacccttctcgcctggttgacctttgatacccacacgtccaggcatcccgatggcacccttgtcccctgggagtccaggtcttccagtgggaccaggaggtcctggtgggcagttacatcctggagacatcttcggggcttcccggcgcctacgcgagtagaacttccatttctcgtccagcagttggttgactcgtcccaaaatagctttctccatctgctgctccccgcgctctgcttccaagcgcagcacccgggcctgcagctccgcggtccgaaagtgggcgagcaggctgagcgccagcgaacacagcgctagagccagcagtccgcagcacccggggctcggcagcctagcgcactgctcagccagcgccactgtcccgggccccggagcgcccagctccccagggccgcggctgccagaggctgccgctttgcgggtgcgctccgccaccatgccctcgcgtcttgagagccaataaataaataaatagaataaataaaaacgagatccaagaggcgcgatccaaactgagaggcaaggggaaagggggttaacgtggctagaggacgtccctttcctttgctcgccaaagaggaccgaaaatgagcagtcggagtcgggagcagccaagagccaccagcagacgcgatcggagtacgccaaagtaagaaaaaagttatttcgaagaatgttccaagttcggggatctggccccgctccccactctttcccttctctcttctgcagagttctcgggctggtgcgacgctcggggtccttctgggtgttttgtgtctccggggagaacgggtgtcagtccccgggcgaaggggcacgcatgcagggccccatgggcagaggtgggtcgtggctgcagtgagccgcgctggggccgattctggcgcctctgtaacttgacacagcc

SEQ ID NO: 285 - RNA, 3146 nt, Rattus norvegicus
  source 1..3146: mol_type = mRNA
ggctgtgtcaagttacagaggcgccggaatcggccccagcgcggctcactgcagccacgacccacctctgcccatggggccctgcatgcgcgccccttcgcccggggactgacacccgctctccccggagacacaaaacacccagaaggaccccgagcgtcgcacgagcccgaggactctgcagaagcgggaagggaaagagcgggcagtggagccagatccctgaacttggaacattcttcgaaataacttttttcttactttggtgtaccccgatcgcgtctgttgctcttggctgccctcaactccgactgctcatttttggtcctttttggcgagcaaaggaaagggacgtcctctagccacgctagctccctttcaccctgcttcttagtttggatcgcacctctttgatctcatttttatttattctatttatttatttattggctctcaagacgcgaggggatggtggcggagcgcgcccgcaaagcggcagcctccagcaaccgcggccctggggatctgggcgcgccagggcccgggacagtggcgctggctgagcagtgcgctaggctgccgagccccgggtgctgcggactgctggctctggcgttgtgctcgctggcgctcagcctgctcgcccactttcggacggccgagctgcaggcccgggtgctgcgcctggaatcggagcgcggggaacagcagatggagaaagctattttgggacgagtcaaccaactgctggacgagaaatggaagttctactcgcgcaggcgcagggaggccccgaagatgtctccaggatgtaactgcccaccaggaccgcctggccccactggaagacctggactcccaggggacaagggtgccatcgggatgcctggacgcgtgggtgtcaaaggtcaaccaggcgagaagggtgcccctggagatgcggggatatccatcatcgggccacgaggcccccctggccagccaggtacccgaggcttccctggattcccgggtcccattggtcttgacggcagaccgggccatcccggacctaaaggggagacgggcctggtgggtcctcgaggacaaccgggacctcagggacaaaagggagaaaagggtcagtgtggagaatacccacaccgggagtatccgagcggcacgctagcagctctgcgctccaacccgataatttccctgaagctgctgcctctcctcaattcagtgcggctggctccacccccagtcattaaaaggcggacctttcagggggaacaaagccaggctggcatccaaggccctccagggccaccgggccccccaggaccaattggccctctgggacacccaggactgccagggcctatagggccacctggtttacccgggcctcctggaccaaagggagacccagggatccagggctatcatggccgcaagggagagcggggcttgccaggaatgccaggcaagcatggagccaagggtgctcctgggattgccgtggctgggatgaagggtgagccagggacgccaggagccaagggtgagaagggtgctacaggctcccctggcctcctggggcagaagggagaaaagggagatgctggcaacgccattggaggaggcaggggagagcctggccccccggggctccctgggccccctgggccaaagggagaagctggtgtcgatggacaggctggtcccccaggacagcaaggagacaaggggcagccaggagcagctggcgaaccgggaccaactggccccaagggttccaagggtgaacccggcaagggagagatggtggactacaacagcagcatcaacgaggctcttcaggagatcaggacgctggccttgatggggcctcctggtcttcctggacaaacaggcccacccggacctccagggactccaggccaaaggggggagattggattgccaggccctccaggacacgatggggacaaggggcctcgaggaaaaccaggagatatggggcctgctggtcctcaaggacccccaggaaaggacgggcctccaggaatgaagggagaggttggacctccaggaaatccaggggagaaaggggagacaggacaagcaggccccccgggtctagacggcccaactggggagaaaggagaaccaggtgatgaagggaggcctggagcgacaggattgcctgggcccatcgggctcccgggattcacaggagagaaaggagaggctggggagaaaggtgacccaggagcagaggtgcctgggccgccagggccagagggtcctccaggaccgccgggcctccaaggtattccaggaccaaagggagaagcaggcctagatggcagtaaaggagagaagggctcccagggagaaaaaggagaccgggggcctctgggattgcctggtactccaggaccaatcggggttccaggcccagccggaccaaagggcgaaaggggcagcaagggagacccagggatgacgggaccaacaggagcagctgggctgcctggtttacacggaccacccggggacaaaggaaaccggggggagagggggaagaagggctctagagggcctaaaggggacaagggggaccaaggagcacctggactagacgccccctgcccactgggagaagatggcttaccagtccaaggctgctggaacaagtgatgcctctaacctcggactggcctgtgtgtgtttgtatataggatatttatttttatacagtttcacctttggaaaatgcccaaactatgatacatcttacagatcattaaaagagaaagaagaaaagcctgcatattttgtacaggaaataacccctttcccttttgtttacaagacatttttttttgtataaatctgtttctaatacactttctgtctgtgtgtctgctcctaatgttgcatgatatttgtgcacacttattaaatatcacagcttaataaattattgtgtgatggtgccaaaggggccttgtctgcataggggtgctgcgagcttacgtgtgaattcccaaaaaatgtggaggtccacggtgtttgccagacgacatgtgtctgacaatattttaaactttaactgactttcattattataaaaaaaataaaacgtggcaatttca

SEQ ID NO: 286 - RNA, 3146 nt, Rattus norvegicus
  source 1..3146: mol_type = mRNA
tgaaattgccacgttttattttttttataataatgaaagtcagttaaagtttaaaatattgtcagacacatgtcgtctggcaaacaccgtggacctccacattttttgggaattcacacgtaagctcgcagcacccctatgcagacaaggcccctttggcaccatcacacaataatttattaagctgtgatatttaataagtgtgcacaaatatcatgcaacattaggagcagacacacagacagaaagtgtattagaaacagatttatacaaaaaaaaatgtcttgtaaacaaaagggaaaggggttatttcctgtacaaaatatgcaggcttttcttctttctcttttaatgatctgtaagatgtatcatagtttgggcattttccaaaggtgaaactgtataaaaataaatatcctatatacaaacacacacaggccagtccgaggttagaggcatcacttgttccagcagccttggactggtaagccatcttctcccagtgggcagggggcgtctagtccaggtgctccttggtcccccttgtcccctttaggccctctagagcccttcttccccctctccccccggtttcctttgtccccgggtggtccgtgtaaaccaggcagcccagctgctcctgttggtcccgtcatccctgggtctcccttgctgcccctttcgccctttggtccggctgggcctggaaccccgattggtcctggagtaccaggcaatcccagaggcccccggtctcctttttctccctgggagcccttctctcctttactgccatctaggcctgcttctccctttggtcctggaataccttggaggcccggcggtcctggaggaccctctggccctggcggcccaggcacctctgctcctgggtcacctttctccccagcctctcctttctctcctgtgaatcccgggagcccgatgggcccaggcaatcctgtcgctccaggcctcccttcatcacctggttctcctttctccccagttgggccgtctagacccggggggcctgcttgtcctgtctcccctttctcccctggatttcctggaggtccaacctctcccttcattcctggaggcccgtcctttcctgggggtccttgaggaccagcaggccccatatctcctggttttcctcgaggccccttgtccccatcgtgtcctggagggcctggcaatccaatctcccccctttggcctggagtccctggaggtccgggtgggcctgtttgtccaggaagaccaggaggccccatcaaggccagcgtcctgatctcctgaagagcctcgttgatgctgctgttgtagtccaccatctctcccttgccgggttcacccttggaacccttggggccagttggtcccggttcgccagctgctcctggctgccccttgtctccttgctgtcctgggggaccagcctgtccatcgacaccagcttctccctttggcccagggggcccagggagccccggggggccaggctctcccctgcctcctccaatggcgttgccagcatctcccttttctcccttctgccccaggaggccaggggagcctgtagcacccttctcacccttggctcctggcgtccctggctcacccttcatcccagccacggcaatcccaggagcacccttggctccatgcttgcctggcattcctggcaagccccgctctcccttgcggccatgatagccctggatccctgggtctccctttggtccaggaggcccgggtaaaccaggtggccctataggccctggcagtcctgggtgtcccagagggccaattggtcctggggggcccggtggccctggagggccttggatgccagcctggctttgttccccctgaaaggtccgccttttaatgactgggggtggagccagccgcactgaattgaggagaggcagcagcttcagggaaattatcgggttggagcgcagagctgctagcgtgccgctcggatactcccggtgtgggtattctccacactgacccttttctcccttttgtccctgaggtcccggttgtcctcgaggacccaccaggcccgtctcccctttaggtccgggatggcccggtctgccgtcaagaccaatgggacccgggaatccagggaagcctcgggtacctggctggccaggggggcctcgtggcccgatgatggatatccccgcatctccaggggcacccttctcgcctggttgacctttgacacccacgcgtccaggcatcccgatggcacccttgtcccctgggagtccaggtcttccagtggggccaggcggtcctggtgggcagttacatcctggagacatcttcggggcctccctgcgcctgcgcgagtagaacttccatttctcgtccagcagttggttgactcgtcccaaaatagctttctccatctgctgttccccgcgctccgattccaggcgcagcacccgggcctgcagctcggccgtccgaaagtgggcgagcaggctgagcgccagcgagcacaacgccagagccagcagtccgcagcacccggggctcggcagcctagcgcactgctcagccagcgccactgtcccgggccctggcgcgcccagatccccagggccgcggttgctggaggctgccgctttgcgggcgcgctccgccaccatcccctcgcgtcttgagagccaataaataaataaatagaataaataaaaatgagatcaaagaggtgcgatccaaactaagaagcagggtgaaagggagctagcgtggctagaggacgtccctttcctttgctcgccaaaaaggaccaaaaatgagcagtcggagttgagggcagccaagagcaacagacgcgatcggggtacaccaaagtaagaaaaaagttatttcgaagaatgttccaagttcagggatctggctccactgcccgctctttcccttcccgcttctgcagagtcctcgggctcgtgcgacgctcggggtccttctgggtgttttgtgtctccggggagagcgggtgtcagtccccgggcgaaggggcgcgcatgcagggccccatgggcagaggtgggtcgtggctgcagtgagccgcgctggggccgattccggcgcctctgtaacttgacacagcc

SEQ ID NO: 287 - RNA, 3160 nt, Macaca fascicularis
  source 1..3160: mol_type = mRNA
gaggaggaggaggagggaggggggcgggagagattagtttgggaagtagcacggattgctcatccgatccgtgcagccgcagggagtgtgtcaagttacagaggcgccggaatcggccccagcgctcctcgccagccgccactacccacctctgcccatggggccctccatgtgcgccccttcgcccggggactgaaactggctggcccgggagacacgaggcgcccaggaggactgacagcgcggcaccaactgctctgcagactcttgaagggaaagactgggcggagagaaggagagccggtcagattcccctaactttcctggacttggaacgttcttcgaaataactttttttctcacctaggtgtaccccaattaccgctggttgtgctttttcggcccttcccctcctactgctaatttttccgtcctctttgccgggagcaacggaaagggacgttttccagcgatacaagccctttcccccttgccccgcagtttggatacagccttttggcagcagctgtcgcctttatttattctatttatttatttattggttctcaagacgtgagaggatggtagcggagagcacccacaaagcgggagccactggtgcctgcggccctagggagttgggcgcgtccgggacggtggctctggcggcggcgcgggcggagcgcggcgcacggctgccgagtccagggtcgtgcgggctgctggcgctggccctctgctcgctggcactcagcctgctcgcccactttcggacggcggagctgcaggcccgggtgctgcgcctggaagcggagcgcggggagcagcaaatggagacggctattttgggacgagtcaaccaactgctggacgagaaatggaagctccactcaaggaggcgccgggaggccccaaagacatctccaggatgtaactgcccaccaggacctcctggtcccactggaagacctggactcccaggggacaaaggtgccattgggatgcctggacgtgtggggtcccccggagatgctgggctgtccatcatcggcccccgcggcccccctggggtccaaccaggcactcgaggttttcctggatttccgggtcccattgggctggatggcaaaccgggccacccaggaccaaagggcgacatgggtctgacgggtcccccaggacagccgggacctcagggacaaaaaggagaaaagggtcagtgtggagagtacccacaccgggagtgcctaagcagcatgccagcagctctgcgctccagccagataattgccctgaagctgctgcctctcctcaattcagtgcgactggctccacccccggtcataaaaaggcggacattccagggtgaacagagccaagccagcatccaaggtccaccagggcccccaggcccccctggaccaagtggacctctggggcacccaggactgccagggcccgtggggccacccggcttacctgggcctcctggaccaaagggagacccagggatccagggctaccacggccggaagggagaacggggcatgccagggatgcccggcaagcatggagccaagggcactcctggaattgccgtggctgggatgaagggcgagccagggatcccaggaaccaagggtgagaagggggctgaaggctcccctgggcttcctggcctcctggggcagaagggagagaaaggcgatgctggcaactccattggaggaggcagaggggaacctggccctccagggctccctggacccccagggccaaagggagaagcgggtgtcgatggccaggtcggccccccagggcggcaaggagacaagggggagcctggagcagctggagaacagggaccagctggccccaagggctccaagggagaaccagggaaaggagagatggtggattacaatggaaacatcaatgaggctctccaggagatccggacactggccttgatggggcctcctggtcttcctgggcaaattggcccacctggagctccagggattccaggccagaagggggagattggactgccaggccctccaggacacgatggggagaagggacctcgcggtaaaccaggagacatgggccctcctggtccccaaggccccccaggaaaggatggacctccaggaatgaaaggagaaaacgggcacccagggagcccaggagaaaagggagagaaaggagagacaggacaagcaggctcgccgggagagaaaggagaagccggggagaagggcgatccaggagcagaggggctccaaggtgttcctggaccaaagggggaagcaggactagatggagcaaaaggagagaaaggcatccagggagaaaaaggagaccgtggtcccctgggactacccggagcttcaggtttggacggcaggcctgggccaccgggtactccaggaccaattggagttccaggcccagcaggaccaaagggcgagaggggcagcaaaggagaccctgggatgacaggaccaacgggagcagctgggcttcctggtttacatggaccacccggggacaagggaaaccggggggagagggggaagaaaggctctagagggcctaaaggggataagggagaccaaggagcgcctggattagatgccccctgcccattgggcgaagatggcttgccagtccaaggctgctggaacaagtgatgcctctaaccttggattggcctgtgtgtgtgtttgtacatagaatatttatttttatacagttttcactttttgaaaatgccagaagtatgatgcatcttacagattattaaaaaagaaagaaaaacctgcatattttgtacagaaaatatcaacctcttcccttttcccttttgtttacaagatgttttgtataaacctgtgtctctaatacactttttgtttgtgagtatggtcgtaatgtctgcatgatatttgtgcacacttattaagtattgaagcttaataaattattgtgtcctggtgccaaagggggccagccagaactgaggtgctggctagctcatgtgtgaattcacataaatgtagaggtccatgatatttgctaagctaggtgtgtcaaagagtattttaaacccttatgcattttcattattaaaaaaaaaatgaaacatggcaattca

SEQ ID NO: 288 - RNA, 3160 nt, Macaca fascicularis
  source 1..3160: mol_type = mRNA
tgaattgccatgtttcattttttttttaataatgaaaatgcataagggtttaaaatactctttgacacacctagcttagcaaatatcatggacctctacatttatgtgaattcacacatgagctagccagcacctcagttctggctggccccctttggcaccaggacacaataatttattaagcttcaatacttaataagtgtgcacaaatatcatgcagacattacgaccatactcacaaacaaaaagtgtattagagacacaggtttatacaaaacatcttgtaaacaaaagggaaaagggaagaggttgatattttctgtacaaaatatgcaggtttttctttcttttttaataatctgtaagatgcatcatacttctggcattttcaaaaagtgaaaactgtataaaaataaatattctatgtacaaacacacacacaggccaatccaaggttagaggcatcacttgttccagcagccttggactggcaagccatcttcgcccaatgggcagggggcatctaatccaggcgctccttggtctcccttatcccctttaggccctctagagcctttcttccccctctccccccggtttcccttgtccccgggtggtccatgtaaaccaggaagcccagctgctcccgttggtcctgtcatcccagggtctcctttgctgcccctctcgccctttggtcctgctgggcctggaactccaattggtcctggagtacccggtggcccaggcctgccgtccaaacctgaagctccgggtagtcccaggggaccacggtctcctttttctccctggatgcctttctctccttttgctccatctagtcctgcttccccctttggtccaggaacaccttggagcccctctgctcctggatcgcccttctccccggcttctcctttctctcccggcgagcctgcttgtcctgtctctcctttctctcccttttctcctgggctccctgggtgcccgttttctcctttcattcctggaggtccatcctttcctggggggccttggggaccaggagggcccatgtctcctggtttaccgcgaggtcccttctccccatcgtgtcctggagggcctggcagtccaatctcccccttctggcctggaatccctggagctccaggtgggccaatttgcccaggaagaccaggaggccccatcaaggccagtgtccggatctcctggagagcctcattgatgtttccattgtaatccaccatctctcctttccctggttctcccttggagcccttggggccagctggtccctgttctccagctgctccaggctcccccttgtctccttgccgccctggggggccgacctggccatcgacacccgcttctccctttggccctgggggtccagggagccctggagggccaggttcccctctgcctcctccaatggagttgccagcatcgcctttctctcccttctgccccaggaggccaggaagcccaggggagccttcagcccccttctcacccttggttcctgggatccctggctcgcccttcatcccagccacggcaattccaggagtgcccttggctccatgcttgccgggcatccctggcatgccccgttctcccttccggccgtggtagccctggatccctgggtctccctttggtccaggaggcccaggtaagccgggtggccccacgggccctggcagtcctgggtgccccagaggtccacttggtccaggggggcctgggggccctggtggaccttggatgctggcttggctctgttcaccctggaatgtccgcctttttatgaccgggggtggagccagtcgcactgaattgaggagaggcagcagcttcagggcaattatctggctggagcgcagagctgctggcatgctgcttaggcactcccggtgtgggtactctccacactgacccttttctcctttttgtccctgaggtcccggctgtcctgggggacccgtcagacccatgtcgccctttggtcctgggtggcccggtttgccatccagcccaatgggacccggaaatccaggaaaacctcgagtgcctggttggaccccaggggggccgcgggggccgatgatggacagcccagcatctccgggggaccccacacgtccaggcatcccaatggcacctttgtcccctgggagtccaggtcttccagtgggaccaggaggtcctggtgggcagttacatcctggagatgtctttggggcctcccggcgcctccttgagtggagcttccatttctcgtccagcagttggttgactcgtcccaaaatagccgtctccatttgctgctccccgcgctccgcttccaggcgcagcacccgggcctgcagctccgccgtccgaaagtgggcgagcaggctgagtgccagcgagcagagggccagcgccagcagcccgcacgaccctggactcggcagccgtgcgccgcgctccgcccgcgccgccgccagagccaccgtcccggacgcgcccaactccctagggccgcaggcaccagtggctcccgctttgtgggtgctctccgctaccatcctctcacgtcttgagaaccaataaataaataaatagaataaataaaggcgacagctgctgccaaaaggctgtatccaaactgcggggcaagggggaaagggcttgtatcgctggaaaacgtccctttccgttgctcccggcaaagaggacggaaaaattagcagtaggaggggaagggccgaaaaagcacaaccagcggtaattggggtacacctaggtgagaaaaaaagttatttcgaagaacgttccaagtccaggaaagttaggggaatctgaccggctctccttctctccgcccagtctttcccttcaagagtctgcagagcagttggtgccgcgctgtcagtcctcctgggcgcctcgtgtctcccgggccagccagtttcagtccccgggcgaaggggcgcacatggagggccccatgggcagaggtgggtagtggcggctggcgaggagcgctggggccgattccggcgcctctgtaacttgacacactccctgcggctgcacggatcggatgagcaatccgtgctacttcccaaactaatctctcccgcccccctccctcctcctcctcctc

SEQ ID NO: 289 - RNA, 3254 nt, Macaca mulatta
  source 1..3254: mol_type = mRNA
cgggagcgcgggagaggggctccggggccggcgggctggggccgccggacctgctcaccacgccccccaccccgggcgagtttgcataaataaacaaattcaagccgtcggccccgcgggaggtggaggaggagtgaggaggaggaggagggaggggggcgggagagattagtttgggaagtagcacggattgctcatccgatccgtgcagccgcagggagtgtgtcaagttacagaggcgccggaatcggccccagcgctcctcgccagccgccactacccacctctgcccatggggccctccatgtgcgccccttcgcccggggactgaaactggctggcccgggagacacgaggcgcccaggaggactgacagcgcggcaccaactgctctgcagactcttgaagggaaagactgggcggagagaaggagagccggtcagattcccctaactttcctggacttggaacgttcttcgaaataactttttttctcacctaggtgtaccccaattaccgctggttgtgctttttcggcccttcccctcctactgctaatttttccgtcctctttgccgggagcaacggaaagggacgttttccagcgatacaagccctttcccccttgccccgcagtttggatacagccttttggcagcagctgtcgcctttatttattctatttatttatttattggttctcaagacgtgagaggatggtagcggagagcacccacaaagcggcagccactggtgcctgcggccctagggagttgggcgcgcccgggacggtggctctggcggcggcgcgggcggagcgcggcgcacggctgccgagtccagggtcgtgcgggctgctggcgctggccctctgctcgctggcactcagcctgctcgcccactttcggacggcggagctgcaggcccgggtgctgcgcctggaagcggagcgcggggagcagcaaatggagacggctattttgggacgagtcaaccaactgctggacgagaaatggaagctccactcaaggaggcgccgggaggccccaaagacatctccaggatgtaactgcccaccaggacctcctggtcccactggaagacctggactcccaggggacaaaggtgccattgggatgcctggacgtgtgggagtaaagggccaaccaggcgagaaggggtcccccggagatgctgggctgtccatcatcggcccccgcggcccccctggtcaaccaggcactcgaggttttcctggatttccgggtcccattgggctggatggcaaaccgggccacccaggaccaaagggcgacatgggtctgacgggtcccccaggacagccgggacctcagggacaaaaaggagaaaagggtcagtgtggagagtacccacaccggctgctgcctctcctcaattcagtgcgactggctccacccccggtcataaaaaggcggacattccagggtgaacagagccaagccagcatccaaggtccaccagggcccccaggcccccctggaccaagtggacctctggggcacccaggactgccagggcccgtggggccacccggcttacctgggcctcctggaccaaagggagacccagggatccagggctaccacggccggaagggagaacggggcatgccagggatgcccggcaagcatggagccaagggcactcctggaattgccgtggctgggatgaagggcgagccagggatcccaggaaccaagggtgagaagggggctgaaggctcccctgggcttcctggcctcctggggcagaagggagagaaaggcgatgctggcaactccattggaggaggcagaggggaacctggccctccagggctccctggacccccagggccaaagggagaagcgggtgtcgatggccaggtcggccccccagggcggcaaggagacaagggggagcctggagcagctggagaacagggaccagctggccccaagggctccaagggagaaccagggaaaggagagatggtggattacaatggaaacatcaatgaggctctccaggagatccggacactggccttgatggggcctcctggtcttcctgggcaaattggcccacctggagctccagggattccaggccagaagggggagattggactgccaggccctccaggacacgatggggagaagggacctcgcggtaaaccaggagacatgggccctcctggtccccaaggccccccaggaaaggatggacctccaggaatgaaaggagaaaacgggcacccagggagcccaggagaaaagggagagaaaggagagacaggacaagcaggctcgccgggagagaaaggagaagccggggagaagggcgatccaggagcagaggggctccaaggtgttcctggaccaaagggggaagcaggactagatggagcaaaaggagagaaaggcatccagggagaaaaaggagaccgtggtcccctgggactacccggagcttcaggtttggacggcaggcctgggccaccgggtactccaggaccaattggagttccaggcccagcaggaccaaagggcgagaggggcagcaaaggagaccctgggatgacaggaccaacgggagcagctgggcttcctggtttacatggaccacccggggacaagggaaaccggggggagagggggaagaaaggctctagagggcctaaaggggataagggagaccaaggagcgcctggattagatgccccctgcccattgggcgaagatggcttgccagtccaaggctgctggaacaagtgatgcctctaaccttggattggcctgtgtgtgtgtttgtacatagaatatttatttttatacagttttcactttttgaaaatgccagaaggatgatgcatcttacagattattaaaaaagaaaaacctgcatattttgtacagaaaatatcaacctcttcccttttcccttttgtttacaagatgttttgtataaacctgtgtctctaatacactttttgtttgtgagtatggtcgtaatgtctgcatgatatttgtgcacacttattaagtattgaagcttaataaattattgtgtcctggtgccaaagggggccagccagaactgaggtgctggctagctcatgtgtgaattcacataaatgtagaggtccatgatatttgctaagctaggtgtgtcgaagagtattttaaacccttatgcattttcattattaaaaaaaaaatgaaacatggcaa

SEQ ID NO: 290 - RNA, 3254 nt, Macaca mulatta
  source 1..3254: mol_type = mRNA
ttgccatgtttcattttttttttaataatgaaaatgcataagggtttaaaatactcttcgacacacctagcttagcaaatatcatggacctctacatttatgtgaattcacacatgagctagccagcacctcagttctggctggccccctttggcaccaggacacaataatttattaagcttcaatacttaataagtgtgcacaaatatcatgcagacattacgaccatactcacaaacaaaaagtgtattagagacacaggtttatacaaaacatcttgtaaacaaaagggaaaagggaagaggttgatattttctgtacaaaatatgcaggtttttcttttttaataatctgtaagatgcatcatccttctggcattttcaaaaagtgaaaactgtataaaaataaatattctatgtacaaacacacacacaggccaatccaaggttagaggcatcacttgttccagcagccttggactggcaagccatcttcgcccaatgggcagggggcatctaatccaggcgctccttggtctcccttatcccctttaggccctctagagcctttcttccccctctccccccggtttcccttgtccccgggtggtccatgtaaaccaggaagcccagctgctcccgttggtcctgtcatcccagggtctcctttgctgcccctctcgccctttggtcctgctgggcctggaactccaattggtcctggagtacccggtggcccaggcctgccgtccaaacctgaagctccgggtagtcccaggggaccacggtctcctttttctccctggatgcctttctctccttttgctccatctagtcctgcttccccctttggtccaggaacaccttggagcccctctgctcctggatcgcccttctccccggcttctcctttctctcccggcgagcctgcttgtcctgtctctcctttctctcccttttctcctgggctccctgggtgcccgttttctcctttcattcctggaggtccatcctttcctggggggccttggggaccaggagggcccatgtctcctggtttaccgcgaggtcccttctccccatcgtgtcctggagggcctggcagtccaatctcccccttctggcctggaatccctggagctccaggtgggccaatttgcccaggaagaccaggaggccccatcaaggccagtgtccggatctcctggagagcctcattgatgtttccattgtaatccaccatctctcctttccctggttctcccttggagcccttggggccagctggtccctgttctccagctgctccaggctcccccttgtctccttgccgccctggggggccgacctggccatcgacacccgcttctccctttggccctgggggtccagggagccctggagggccaggttcccctctgcctcctccaatggagttgccagcatcgcctttctctcccttctgccccaggaggccaggaagcccaggggagccttcagcccccttctcacccttggttcctgggatccctggctcgcccttcatcccagccacggcaattccaggagtgcccttggctccatgcttgccgggcatccctggcatgccccgttctcccttccggccgtggtagccctggatccctgggtctccctttggtccaggaggcccaggtaagccgggtggccccacgggccctggcagtcctgggtgccccagaggtccacttggtccaggggggcctgggggccctggtggaccttggatgctggcttggctctgttcaccctggaatgtccgcctttttatgaccgggggtggagccagtcgcactgaattgaggagaggcagcagccggtgtgggtactctccacactgacccttttctcctttttgtccctgaggtcccggctgtcctgggggacccgtcagacccatgtcgccctttggtcctgggtggcccggtttgccatccagcccaatgggacccggaaatccaggaaaacctcgagtgcctggttgaccaggggggccgcgggggccgatgatggacagcccagcatctccgggggaccccttctcgcctggttggccctttactcccacacgtccaggcatcccaatggcacctttgtcccctgggagtccaggtcttccagtgggaccaggaggtcctggtgggcagttacatcctggagatgtctttggggcctcccggcgcctccttgagtggagcttccatttctcgtccagcagttggttgactcgtcccaaaatagccgtctccatttgctgctccccgcgctccgcttccaggcgcagcacccgggcctgcagctccgccgtccgaaagtgggcgagcaggctgagtgccagcgagcagagggccagcgccagcagcccgcacgaccctggactcggcagccgtgcgccgcgctccgcccgcgccgccgccagagccaccgtcccgggcgcgcccaactccctagggccgcaggcaccagtggctgccgctttgtgggtgctctccgctaccatcctctcacgtcttgagaaccaataaataaataaatagaataaataaaggcgacagctgctgccaaaaggctgtatccaaactgcggggcaagggggaaagggcttgtatcgctggaaaacgtccctttccgttgctcccggcaaagaggacggaaaaattagcagtaggaggggaagggccgaaaaagcacaaccagcggtaattggggtacacctaggtgagaaaaaaagttatttcgaagaacgttccaagtccaggaaagttaggggaatctgaccggctctccttctctccgcccagtctttcccttcaagagtctgcagagcagttggtgccgcgctgtcagtcctcctgggcgcctcgtgtctcccgggccagccagtttcagtccccgggcgaaggggcgcacatggagggccccatgggcagaggtgggtagtggcggctggcgaggagcgctggggccgattccggcgcctctgtaacttgacacactccctgcggctgcacggatcggatgagcaatccgtgctacttcccaaactaatctctcccgcccccctccctcctcctcctcctcactcctcctccacctcccgcggggccgacggcttgaatttgtttatttatgcaaactcgcccggggtggggggcgtggtgagcaggtccggcggccccagcccgccggccccggagcccctctcccgcgctcccg

SEQ ID NO: 291 - RNA, 2566 nt, Homo sapiens
  source 1..2566: mol_type = mRNA
gagctattttgaaagtgaccctgggctggggcgccggggcgagcgcggcggcgcggaaccatgacagaagatgaccgaggcggcgctggtggagggccaggtcaagctgcgggacggcaagaagtggaagagtaggtggctggtgctgcggaagccgtcgcccgtggcagactgcctgctgatgctggtctacaaggacaagtcggagcgtatcaagggcctgcgggagcgcagcagcctgacgctagaggacatctgcgggctggagcccggcctgccctacgagggcctggtccacacgctggccattgtctgcctgtcccaggccatcatgctgggctttgacagccacgaggccatgtgtgcgtgggatgcccggatccgctatgcgctcggcgaggtgcataggttccatgtgacagtggctccaggcaccaagttggagagcggcccggctaccctgcacctctgcaatgatgtcctcgtcttggccagggacatccccccggctgtcacggggcagtggaagctgtctgacctccggcgctacggggccgtgccaagcggattcatctttgaaggcgggaccaggtgtgggtactgggctggcgtcttcttcctgtcctcggccgagggggagcagatcagcttcctgttcgactgcatcgtccgaggcatctcccccaccaagggcccctttgggctgcggccggttctaccagacccaagtcccccgggaccctcgactgtggaggagcgtgtggcccaggaagccctggaaaccctacagctggagaagcggctgagcctcctctcacatgcgggcaggccgggcagtggaggggatgaccgcagcctgtccagctcatcctcagaggccagtcacttggacgtcagcgccagcagccggctcaccgcatggccagagcaatcctcgtcgtcagccagcacgtcacaggaggggcctagaccagcagctgcccaggccgccggggaagccatggtgggtgcctcaaggccaccccccaagccgctgcgtccgcggcagctgcaggaggttggccgccagagctcctcggacagcggcatcgccactggcagccactcctcttactccagcagcctctcgtcctacgcgggcagcagcctggacgtgtggcgggccacagatgaactgggctcactgctcagcctgccagcagcgggggcccccgagcccagcctgtgcacctgcctgcccgggacagtcgagtaccaggtgcccacctccctgcgggcccactatgacacaccacgcagcctttgcctggctcctagagaccacagccccccctcacagggcagccccggcaacagtgcggccagggactcaggcggccagacgtccgccgggtgtccctctggctggctgggcacgagacggcggggcctggtgatggaggccccccagggcagcgaggccacactgcctggccctgcccctggcgagccctgggaagcaggcggcccccacgcggggccacccccggctttcttttcggcatgtccagtctgtggaggactcaaggtaaacccccctccttgagagccgcagatcccgccccgcggctgcaaaggggctgaatttgcccccagatggcagaggaagtggcgccagcctccttgcagactggtgctctgtgttctgtgggagggaccgggggtctcccggagaggggagctggagggcgcgccctgtggctgccaccggaggaaggggctgacttggggaggtgagttctggaaggcaggggctctgggtccggcaggtcggggtcaccagagccccaatgctcagctgcttcactccgtgtcccccacccctgaggatcaggtgagtgctgcacctctgttggctcgtgccttgcactggggtgccaagggctggaggccctgccgctggccttgtcctccttgggcctcacgcccccttcgggggtggccggttctccccatcacctctctggggcagtcacaccacctgttaagcatcaagctaccacagaggctccggccacctgggctccaccagcccagcccccctgggctccgtgtgcgctgggcctcatccccatctatgggaggaaactgaagctcaggaggctgtgtggcttgcggggtctctgggttctgggccccactgttccccagtgaagcccttgtgggaaggttccgggagcaggtggtgtcctcagagcagcctcgcctgctgaccccactgggagaggcgccgtgcctcgggcccctggtgggagctctgctggctcctgtctgaacctcctcgcagggccaaaggctggcttggcctgtgtttcccctggcccaggcctcagcccctgcgtcggaggtggggctgtgttgggcccattgtcccccgccctgggtggcttcctcttgcacagcctggagcctgccctgaccacagcccagcagctccctgtgaacacctctttgtcccttcactgtcagctgtttctaaacccagacactgtttgtaatagactggaaataaaatgttctttcctta

SEQ ID NO: 292 - RNA, 2566 nt, Homo sapiens
  source 1..2566: mol_type = mRNA
taaggaaagaacattttatttccagtctattacaaacagtgtctgggtttagaaacagctgacagtgaagggacaaagaggtgttcacagggagctgctgggctgtggtcagggcaggctccaggctgtgcaagaggaagccacccagggcgggggacaatgggcccaacacagccccacctccgacgcaggggctgaggcctgggccaggggaaacacaggccaagccagcctttggccctgcgaggaggttcagacaggagccagcagagctcccaccaggggcccgaggcacggcgcctctcccagtggggtcagcaggcgaggctgctctgaggacaccacctgctcccggaaccttcccacaagggcttcactggggaacagtggggcccagaacccagagaccccgcaagccacacagcctcctgagcttcagtttcctcccatagatggggatgaggcccagcgcacacggagcccaggggggctgggctggtggagcccaggtggccggagcctctgtggtagcttgatgcttaacaggtggtgtgactgccccagagaggtgatggggagaaccggccacccccgaagggggcgtgaggcccaaggaggacaaggccagcggcagggcctccagcccttggcaccccagtgcaaggcacgagccaacagaggtgcagcactcacctgatcctcaggggtgggggacacggagtgaagcagctgagcattggggctctggtgaccccgacctgccggacccagagcccctgccttccagaactcacctccccaagtcagccccttcctccggtggcagccacagggcgcgccctccagctcccctctccgggagacccccggtccctcccacagaacacagagcaccagtctgcaaggaggctggcgccacttcctctgccatctgggggcaaattcagcccctttgcagccgcggggcgggatctgcggctctcaaggaggggggtttaccttgagtcctccacagactggacatgccgaaaagaaagccgggggtggccccgcgtgggggccgcctgcttcccagggctcgccaggggcagggccaggcagtgtggcctcgctgccctggggggcctccatcaccaggccccgccgtctcgtgcccagccagccagagggacacccggcggacgtctggccgcctgagtccctggccgcactgttgccggggctgccctgtgagggggggctgtggtctctaggagccaggcaaaggctgcgtggtgtgtcatagtgggcccgcagggaggtgggcacctggtactcgactgtcccgggcaggcaggtgcacaggctgggctcgggggcccccgctgctggcaggctgagcagtgagcccagttcatctgtggcccgccacacgtccaggctgctgcccgcgtaggacgagaggctgctggagtaagaggagtggctgccagtggcgatgccgctgtccgaggagctctggcggccaacctcctgcagctgccgcggacgcagcggcttggggggtggccttgaggcacccaccatggcttccccggcggcctgggcagctgctggtctaggcccctcctgtgacgtgctggctgacgacgaggattgctctggccatgcggtgagccggctgctggcgctgacgtccaagtgactggcctctgaggatgagctggacaggctgcggtcatcccctccactgcccggcctgcccgcatgtgagaggaggctcagccgcttctccagctgtagggtttccagggcttcctgggccacacgctcctccacagtcgagggtcccgggggacttgggtctggtagaaccggccgcagcccaaaggggcccttggtgggggagatgcctcggacgatgcagtcgaacaggaagctgatctgctccccctcggccgaggacaggaagaagacgccagcccagtacccacacctggtcccgccttcaaagatgaatccgcttggcacggccccgtagcgccggaggtcagacagcttccactgccccgtgacagccggggggatgtccctggccaagacgaggacatcattgcagaggtgcagggtagccgggccgctctccaacttggtgcctggagccactgtcacatggaacctatgcacctcgccgagcgcatagcggatccgggcatcccacgcacacatggcctcgtggctgtcaaagcccagcatgatggcctgggacaggcagacaatggccagcgtgtggaccaggccctcgtagggcaggccgggctccagcccgcagatgtcctctagcgtcaggctgctgcgctcccgcaggcccttgatacgctccgacttgtccttgtagaccagcatcagcaggcagtctgccacgggcgacggcttccgcagcaccagccacctactcttccacttcttgccgtcccgcagcttgacctggccctccaccagcgccgcctcggtcatcttctgtcatggttccgcgccgccgcgctcgccccggcgccccagcccagggtcactttcaaaatagctc

SEQ ID NO: 293 - RNA, 2723 nt, Mus musculus
  source 1..2723: mol_type = mRNA
gtctcccccacatccaggtccccgtgtcgctgcgccccgcccgccgcgccgggcccgccctcctggcgcagcccaaggccctcccggagctattttgaaagtgaccctgggctcaggcgcccaggacgcgtggagagggcgcagcgggcggcgggaaccatgacagaagatgaccgaggcagcgctggtggagggccaggtcaagctgcgggacggcaagaagtggaagagtaggtggctggtgctgcgcaagccatcgccggtggcagactgcctgctgatgctggtctacaaggacaaatgtgaacgctccaagggccttcgggagcgcagcagcctcaccctggaggacatctgtggcctggagcctgccctgccctatgagggcctggcccacactctggccatcatctgcctgtctcaggctgttatgctgggcttcgatagccatgaggccatgtgtgcctgggatacccgtatccgctacgcactgggcgaggtgcacaggttccatgtgacagtagctcctggtaccaaactggagagtggtccagccactcttcacctctgcaatgacattctggtcctggccagagacatccctccaaccgtcatggggcagtggaagctgtctgacctccggcgttacggggctgttccgaatggattcatcttcgaaggcgggaccaggtgtgggtactgggctggagtcttcttcttgtcatcagctgagggagagcagatgagcttcctgtttgactgcatcgtccgaggcatctccccgaccaaaggcccgtttgggcttcggccagttctcccagacccgagttctgggggaccctcagcctcagaagagcgtgttgcccaggaagcactggaagccctgcagctagagaagaggctcagcctgctttctcactctggccggccaggcagtggaggggatgacagaagtctatccagttcctcttctgaggctagccactcggacatcagcgccagcagcaggctcactgcgtggccggagcagtcctcatcctcggccggcacatcacaagaaggaccagggctggtggctgcccagggcccaggagaagccatgctgggagcctcaaggccacccctcaagccactgcggcctcggcagttacaggaggttggccgccagagctcctctgacagtggcattgccacaggcagccactcctcttactctggcagcttctcctcttatgccggcagcaacctggacgtgtggcgggccggtgaggaattcggttctctgctcagtctgccccctggagccagcgcacctgagcccagactgtgtgcctgcccacctggggcggccgagtaccaggtgcccacgtcactgagacaccactatgacacacctcgaagcctgcgccaggcccccagagacccaagcccagcttctcagggcagctctgaccacggttcagccacagacttgggtggtcaggcgcccacagggtgtccctccagttggctgggagctcgccgacggggacaggcaacggaaggcccaggcagtgacgctgcgctgccgagtccatcccctggcgagtcctgggaagcaggcagcccccatgcagggccgcctccagctttctttttgtcatgttcaatctgtggcggactcaaggtcatggctacttcatcccctggattcactgtgacgcatccaggatctccagggcgggtggctgctgatagccctgggcctgagcgaccacacagtgagatgcccacgtatgtgaatatccccatcagccccatctccagaccgcagctgcactacatggacttggagctcccgggggccagtgctggtgttcgaggggccagcacctcccgctatgcccagattgacattgcagctaccgagacagcacatcgcgtcggggtccggcatgcgcagactcgggaggaacggttaccagagttggagcagcggaagaaggggccctgaggctgggactggctgggcacatggccagctggactgtccaacatggccaggcagggatggtggccttttggggctagagaccttggcctgtctgtgtactctggtggtcagtaattgaagctgagtcttgacctcctgctgcagtggaggctgtggctggtctttgtgcattggaatgagtagtcagaggttctgggcccagaccatatcagttcattccaatatgtgaaaggcatgtagtagcctcctttttgccagcagggtctcttgcctcactggtggccaagacttgacttgaacaagttctcctatgccatggggccaccaagagacccatctccaggaatcggtagcctcagcatctgacacaacagcactactagctgcccggttgaaatggaaagtctcccaggcctggaatgcaagctgtattacccatcctggacgaggtgaccacgatgacagtttgcactagcagaacactctgcactggtcctgtactcagagggacctgtgacttgccactggagccccctccccttttcctacagtgtctctcttgagcaaggccctgtaccttgggatgaagaccagggtggggacaagtctgtttccacttgtcatcttgttgggacctactccagcagtcgggtacatggttttaaatccccactgttacatttttaacaatttatattattttccaaaagctgaaaaaaaaaaaaaaaaa

SEQ ID NO: 294 - RNA, 2723 nt, Mus musculus
  source 1..2723: mol_type = mRNA
tttttttttttttttttcagcttttggaaaataatataaattgttaaaaatgtaacagtggggatttaaaaccatgtacccgactgctggagtaggtcccaacaagatgacaagtggaaacagacttgtccccaccctggtcttcatcccaaggtacagggccttgctcaagagagacactgtaggaaaaggggagggggctccagtggcaagtcacaggtccctctgagtacaggaccagtgcagagtgttctgctagtgcaaactgtcatcgtggtcacctcgtccaggatgggtaatacagcttgcattccaggcctgggagactttccatttcaaccgggcagctagtagtgctgttgtgtcagatgctgaggctaccgattcctggagatgggtctcttggtggccccatggcataggagaacttgttcaagtcaagtcttggccaccagtgaggcaagagaccctgctggcaaaaaggaggctactacatgcctttcacatattggaatgaactgatatggtctgggcccagaacctctgactactcattccaatgcacaaagaccagccacagcctccactgcagcaggaggtcaagactcagcttcaattactgaccaccagagtacacagacaggccaaggtctctagccccaaaaggccaccatccctgcctggccatgttggacagtccagctggccatgtgcccagccagtcccagcctcagggccccttcttccgctgctccaactctggtaaccgttcctcccgagtctgcgcatgccggaccccgacgcgatgtgctgtctcggtagctgcaatgtcaatctgggcatagcgggaggtgctggcccctcgaacaccagcactggcccccgggagctccaagtccatgtagtgcagctgcggtctggagatggggctgatggggatattcacatacgtgggcatctcactgtgtggtcgctcaggcccagggctatcagcagccacccgccctggagatcctggatgcgtcacagtgaatccaggggatgaagtagccatgaccttgagtccgccacagattgaacatgacaaaaagaaagctggaggcggccctgcatgggggctgcctgcttcccaggactcgccaggggatggactcggcagcgcagcgtcactgcctgggccttccgttgcctgtccccgtcggcgagctcccagccaactggagggacaccctgtgggcgcctgaccacccaagtctgtggctgaaccgtggtcagagctgccctgagaagctgggcttgggtctctgggggcctggcgcaggcttcgaggtgtgtcatagtggtgtctcagtgacgtgggcacctggtactcggccgccccaggtgggcaggcacacagtctgggctcaggtgcgctggctccagggggcagactgagcagagaaccgaattcctcaccggcccgccacacgtccaggttgctgccggcataagaggagaagctgccagagtaagaggagtggctgcctgtggcaatgccactgtcagaggagctctggcggccaacctcctgtaactgccgaggccgcagtggcttgaggggtggccttgaggctcccagcatggcttctcctgggccctgggcagccaccagccctggtccttcttgtgatgtgccggccgaggatgaggactgctccggccacgcagtgagcctgctgctggcgctgatgtccgagtggctagcctcagaagaggaactggatagacttctgtcatcccctccactgcctggccggccagagtgagaaagcaggctgagcctcttctctagctgcagggcttccagtgcttcctgggcaacacgctcttctgaggctgagggtcccccagaactcgggtctgggagaactggccgaagcccaaacgggcctttggtcggggagatgcctcggacgatgcagtcaaacaggaagctcatctgctctccctcagctgatgacaagaagaagactccagcccagtacccacacctggtcccgccttcgaagatgaatccattcggaacagccccgtaacgccggaggtcagacagcttccactgccccatgacggttggagggatgtctctggccaggaccagaatgtcattgcagaggtgaagagtggctggaccactctccagtttggtaccaggagctactgtcacatggaacctgtgcacctcgcccagtgcgtagcggatacgggtatcccaggcacacatggcctcatggctatcgaagcccagcataacagcctgagacaggcagatgatggccagagtgtgggccaggccctcatagggcagggcaggctccaggccacagatgtcctccagggtgaggctgctgcgctcccgaaggcccttggagcgttcacatttgtccttgtagaccagcatcagcaggcagtctgccaccggcgatggcttgcgcagcaccagccacctactcttccacttcttgccgtcccgcagcttgacctggccctccaccagcgctgcctcggtcatcttctgtcatggttcccgccgcccgctgcgccctctccacgcgtcctgggcgcctgagcccagggtcactttcaaaatagctccgggagggccttgggctgcgccaggagggcgggcccggcgcggcgggcggggcgcagcgacacggggacctggatgtgggggagac

SEQ ID NO: 295 - RNA, 2428 nt, Rattus norvegicus
  source 1..2428: mol_type = mRNA
gtctccgcagtggaagagtaggtggctggtgctgcgcaagccatcgccggtggcagactgcctgctgatgctggtctacaaggacaggtgtgaacgttcaaagggcctgcgggagcgcagcagcctcaccctggaggacatctgtggcctggagcctgccctgccctatgagggcctggcccacaccctggctatcatctgcctgtctcaggccatcatgctgggctttgacagccacgaggccatgtgtgcctgggacactcgtatccgctatgcattgggcgaggtgcatcggttccatgtgacggtagctcctggcaccaaactggagagtggtccagccactcttcatctctgcaatgacatcctggtcctggccagagacatccctccaactgtcacggggcagtggaagttgtctgatctccggcgttatggggctgtgccaaatggattcatctttgaaggcgggaccaggtgtgggtactgggctggagtcttcttcttgtcctcagctgagggagagcagatcagcttcctgtttgactgcattgtccgaggcatctccccaaccaaaggcccatttgggcttcggccagttctcccagacccaagttctgggggaccctcagcctcagaagagcgtgttgcccaggaagcactggaggccctgcagctagagaagaggctcagcctgctttcacactctggccggccaggcagtggaggggatgatcgaagtctatccagttcctcttctgaggccagccactcagacatcagcgccagcagccggctcactgcatggccagagcagtcctcgtcctcagccagcacatcgcaagaaggaccagggctggtggctgcccagggcccaggggaagccatgctgggagcctcaaggccacccctcaagccactgcggcctcggcagttacaggaggttggccgccagagctcctctgacagtggcattgccacaggcagccactcctcctactctggcagcttctcatcctatgcgggcagcaacctggacgtgtggcgggctggcgaggaattcggttctctgctcagcctgccccctggagccagcgcacctgagcccagactgtgcgcctgcccacctggggcggccgagtaccaggtgcccacttcattgcgacaccactacgacacacctcgaagcctacgccaggcccccagagacccaagccccgcctctcagggcggctctgaccacagttcagctacagactcgggtggtcaggcacccacggggtctccctccagttgtctgggagctcgaagacgggggcaggcaacggaaggcccaggcagtgaagctgtgctgcccagtccatcccctggcgagtcctgggaagcaggcagccctcatactgggccacctccagctttctttttgtcttgttcaatctgtggcggactcaaggtcacggctacttcatccactggactcactgtgacgcatccaggatccccaggggtggctgctgacagccctgggcctgaacgaccacacggcgagacgcccacgtatgtgaatatccccatcagccccacctccagactgcagctgcattacatggacctagagctctcgggagccagtgggggtgtgcgaggggtcagcgcctcccgctatgcacagattgacatcacagctacggagacggcacatcgcgtaggggtccagcacgcgcagaaccgggaggaacgattgccagagttggagcagcggaagaagggaccctgagctgaggctgcagctcaggctgggactggccagccggactgtccaacagagacaggaaggctgtggttggcctttgtgcatcgttggaatgagtggtcgtaggttctgggcccacaccatatcagttcattccaatgtgtgaaagccgtgtagcagcctcctctttgccagcaggggctcttgccttactggtgcctaagacttgacctgaacaagttctcctaggccacggggccaccaacagacccatctccatgttttggtagcctcagtgtcagccaaacagcactgctaagccacccagtgggactgggaagtcccccaggcctggaatgcaagctgcactacccatcccggacggaagaggtgaccatggtgacagcagagcactctaaagccggttctgtatccagagggacctgtgacttgccactgatgagccactgagtggctctgctgctgggacactgcagcagccttccctaccttctcctgcagtgtctcccttgagctaggccctgtgccttaggatgaaggccacggtggggacaggactgttccctcttgtcatcatgttgggacctactccagtagctgggtaaattgtcttaaatccctactgttatatttttaacaatttatattattttc

SEQ ID NO: 296 - RNA, 2428 nt, Rattus norvegicus
  source 1..2428: mol_type = mRNA
gaaaataatataaattgttaaaaatataacagtagggatttaagacaatttacccagctactggagtaggtcccaacatgatgacaagagggaacagtcctgtccccaccgtggccttcatcctaaggcacagggcctagctcaagggagacactgcaggagaaggtagggaaggctgctgcagtgtcccagcagcagagccactcagtggctcatcagtggcaagtcacaggtccctctggatacagaaccggctttagagtgctctgctgtcaccatggtcacctcttccgtccgggatgggtagtgcagcttgcattccaggcctgggggacttcccagtcccactgggtggcttagcagtgctgtttggctgacactgaggctaccaaaacatggagatgggtctgttggtggccccgtggcctaggagaacttgttcaggtcaagtcttaggcaccagtaaggcaagagcccctgctggcaaagaggaggctgctacacggctttcacacattggaatgaactgatatggtgtgggcccagaacctacgaccactcattccaacgatgcacaaaggccaaccacagccttcctgtctctgttggacagtccggctggccagtcccagcctgagctgcagcctcagctcagggtcccttcttccgctgctccaactctggcaatcgttcctcccggttctgcgcgtgctggacccctacgcgatgtgccgtctccgtagctgtgatgtcaatctgtgcatagcgggaggcgctgacccctcgcacacccccactggctcccgagagctctaggtccatgtaatgcagctgcagtctggaggtggggctgatggggatattcacatacgtgggcgtctcgccgtgtggtcgttcaggcccagggctgtcagcagccacccctggggatcctggatgcgtcacagtgagtccagtggatgaagtagccgtgaccttgagtccgccacagattgaacaagacaaaaagaaagctggaggtggcccagtatgagggctgcctgcttcccaggactcgccaggggatggactgggcagcacagcttcactgcctgggccttccgttgcctgcccccgtcttcgagctcccagacaactggagggagaccccgtgggtgcctgaccacccgagtctgtagctgaactgtggtcagagccgccctgagaggcggggcttgggtctctgggggcctggcgtaggcttcgaggtgtgtcgtagtggtgtcgcaatgaagtgggcacctggtactcggccgccccaggtgggcaggcgcacagtctgggctcaggtgcgctggctccagggggcaggctgagcagagaaccgaattcctcgccagcccgccacacgtccaggttgctgcccgcataggatgagaagctgccagagtaggaggagtggctgcctgtggcaatgccactgtcagaggagctctggcggccaacctcctgtaactgccgaggccgcagtggcttgaggggtggccttgaggctcccagcatggcttcccctgggccctgggcagccaccagccctggtccttcttgcgatgtgctggctgaggacgaggactgctctggccatgcagtgagccggctgctggcgctgatgtctgagtggctggcctcagaagaggaactggatagacttcgatcatcccctccactgcctggccggccagagtgtgaaagcaggctgagcctcttctctagctgcagggcctccagtgcttcctgggcaacacgctcttctgaggctgagggtcccccagaacttgggtctgggagaactggccgaagcccaaatgggcctttggttggggagatgcctcggacaatgcagtcaaacaggaagctgatctgctctccctcagctgaggacaagaagaagactccagcccagtacccacacctggtcccgccttcaaagatgaatccatttggcacagccccataacgccggagatcagacaacttccactgccccgtgacagttggagggatgtctctggccaggaccaggatgtcattgcagagatgaagagtggctggaccactctccagtttggtgccaggagctaccgtcacatggaaccgatgcacctcgcccaatgcatagcggatacgagtgtcccaggcacacatggcctcgtggctgtcaaagcccagcatgatggcctgagacaggcagatgatagccagggtgtgggccaggccctcatagggcagggcaggctccaggccacagatgtcctccagggtgaggctgctgcgctcccgcaggccctttgaacgttcacacctgtccttgtagaccagcatcagcaggcagtctgccaccggcgatggcttgcgcagcaccagccacctactcttccactgcggagac

SEQ ID NO: 297 - RNA, 2596 nt, Macaca fascicularis
  source 1..2596: mol_type = mRNA
tgcccgcgggcccgccctcctggcccagcccagggccctgggagctattttgaaagtgaccctgggctggggcgccggggcgagcgcggcggcgcggaaccatgacagaagatgaccgaggcggcgctggtggagggccaggtcaagctgcgggacggcaagaagtggaagagtaggtggctggtgctgcgcaagccgtcgcccgtggcagactgcctgctgatgctggtctacaaggacaagtcggagcgctccaagggcctgcgggagcgcagcagcctgacactagaggacatctgcgggctggagcccggcctgccctacgaaggcctggcccacacgctggccatcgtctgcctgtcccaggctgtcatgctgggcttcgacagccacgaggccatgtgtgcgtgggatgcccggatccgctatgcgctaggcgaggtgcacaggttccatgtgacagtggctccaggcaccaagttggagagcggcccggccaccctgcacctctgcaatgacatcctcgtcttggccagggacatccccccggctgtcatggggcagtggaagctgtccgacctccggcgctacggggccgtgccgagcggattcatctttgaaggcgggaccaggtgtgggtactgggctggtgtcttcttcctgtcctcggccgagggggagcagatcagcttcctgttcgactgcatcgtccgaggcatctcccccaccaagggcccctttgggctgcggccggttctcccagacccaagtcccccgggaccctcgactgtggaggagcgcgtggcccaggaagccttggaaaccctgcagctggagaagcggctgagcctcctctcgcatgcaggccggccgggcagtggaggggatgaccgcagcctgtccagctcatcctcggaggccagccacttggacgtcagcgccagcagccggctcaccgcatggccagagcagtccttgtcgtcggccagcacgtcgcaggaggggcctagaccagcagctgcccaggcccccggggaagccatgctgggtgcctcaaggccacctcccaagccgctgcggccacggcagctgcaggaggtcggccgccagagctcctcggacagcggcatcgccactggcagccactcctcctactccggcagcctctcgtcctatgcgggcagcagcctggacgtgtggcgggccacggacgaactgggctcactgctcagcctgccagcagccggggcgcccgagcccagcctgtgcgcctgcctgcctggggccgtcgagtaccaggtgcccacctccctgaggccccactacgacacaccacgcagccttcgcctggttcccagggaccacagccccgcctcgcagggcagccccggcgacagtgcggccggggactcaggcggccagacgtccgccgggtgtccctctggctggctgggcacgagacggcggggcctggtgatggaggccccccagggcagcgaggccacactgcccagcccggcccccggagagccctgggaagcaggcagcccccacgcggggccatccccggctttcttttcggcatgtccagtctgtggaggactcaagggagtggccgcctcagccccgggacccgtgacagcacattcaggatccccaggacccgtggctgtggacagcccagggccagagaggccacgcggcgagccacctgcttacgtgaacatccccgtcagccccccctccgggaagcagctgcactacatgggcctggagctccaggaggccagcgagggggtccgaggggccagcgcctccctctacgcccagattgacatcgcggccactgagatggcgcacagagtgggagcgcagcacgcacgggcccgggaggagcagctgtcagagctggagcagaggaaggcagccccgcagtgaagctgcaacgccaggagctgaccacaaacctggcccccgggccacctcgtggcccccagcaggccggccccttctattggtcgtggcctgatccccagggagcccccagtcacaggagagggcatggccggtctccgggccacagtgcgaacaggaagacgtctccagggcccacagccaggcctccggcctcacgagtgctgggggttgacacttcctttggcctgaatgagtcgctctggaccccaggccacctgaggccccgcttccaggcatcaggcagctctggttgctgttgcgcgtctcaggcagaggctgctgcccaggagtgtttgggagcatggtttgtggtgcctgggatgcaaaccgccctctcaccctgggggtgactgcacggatgacagccgtgtcctggcaaaacgctcatcgcttcacctgggtgttgtggccccacagcgccaggacccagtgcccgctcacactgtcggcaccacgcccactcctgaaactggcggctcagacacttccggcgtcccctccccatctcccggctgtcctgcctgggccaccgcagccctgcgcctggggacggagcctggactcttccagccgcctgactgctgcacttcttgggacacattgcagtcagtcatgtaaa

SEQ ID NO: 298 - RNA, 2596 nt, Macaca fascicularis
  source 1..2596: mol_type = mRNA
tttacatgactgactgcaatgtgtcccaagaagtgcagcagtcaggcggctggaagagtccaggctccgtccccaggcgcagggctgcggtggcccaggcaggacagccgggagatggggaggggacgccggaagtgtctgagccgccagtttcaggagtgggcgtggtgccgacagtgtgagcgggcactgggtcctggcgctgtggggccacaacacccaggtgaagcgatgagcgttttgccaggacacggctgtcatccgtgcagtcacccccagggtgagagggcggtttgcatcccaggcaccacaaaccatgctcccaaacactcctgggcagcagcctctgcctgagacgcgcaacagcaaccagagctgcctgatgcctggaagcggggcctcaggtggcctggggtccagagcgactcattcaggccaaaggaagtgtcaacccccagcactcgtgaggccggaggcctggctgtgggccctggagacgtcttcctgttcgcactgtggcccggagaccggccatgccctctcctgtgactgggggctccctggggatcaggccacgaccaatagaaggggccggcctgctgggggccacgaggtggcccgggggccaggtttgtggtcagctcctggcgttgcagcttcactgcggggctgccttcctctgctccagctctgacagctgctcctcccgggcccgtgcgtgctgcgctcccactctgtgcgccatctcagtggccgcgatgtcaatctgggcgtagagggaggcgctggcccctcggaccccctcgctggcctcctggagctccaggcccatgtagtgcagctgcttcccggagggggggctgacggggatgttcacgtaagcaggtggctcgccgcgtggcctctctggccctgggctgtccacagccacgggtcctggggatcctgaatgtgctgtcacgggtcccggggctgaggcggccactcccttgagtcctccacagactggacatgccgaaaagaaagccggggatggccccgcgtgggggctgcctgcttcccagggctctccgggggccgggctgggcagtgtggcctcgctgccctggggggcctccatcaccaggccccgccgtctcgtgcccagccagccagagggacacccggcggacgtctggccgcctgagtccccggccgcactgtcgccggggctgccctgcgaggcggggctgtggtccctgggaaccaggcgaaggctgcgtggtgtgtcgtagtggggcctcagggaggtgggcacctggtactcgacggccccaggcaggcaggcgcacaggctgggctcgggcgccccggctgctggcaggctgagcagtgagcccagttcgtccgtggcccgccacacgtccaggctgctgcccgcataggacgagaggctgccggagtaggaggagtggctgccagtggcgatgccgctgtccgaggagctctggcggccgacctcctgcagctgccgtggccgcagcggcttgggaggtggccttgaggcacccagcatggcttccccgggggcctgggcagctgctggtctaggcccctcctgcgacgtgctggccgacgacaaggactgctctggccatgcggtgagccggctgctggcgctgacgtccaagtggctggcctccgaggatgagctggacaggctgcggtcatcccctccactgcccggccggcctgcatgcgagaggaggctcagccgcttctccagctgcagggtttccaaggcttcctgggccacgcgctcctccacagtcgagggtcccgggggacttgggtctgggagaaccggccgcagcccaaaggggcccttggtgggggagatgcctcggacgatgcagtcgaacaggaagctgatctgctccccctcggccgaggacaggaagaagacaccagcccagtacccacacctggtcccgccttcaaagatgaatccgctcggcacggccccgtagcgccggaggtcggacagcttccactgccccatgacagccggggggatgtccctggccaagacgaggatgtcattgcagaggtgcagggtggccgggccgctctccaacttggtgcctggagccactgtcacatggaacctgtgcacctcgcctagcgcatagcggatccgggcatcccacgcacacatggcctcgtggctgtcgaagcccagcatgacagcctgggacaggcagacgatggccagcgtgtgggccaggccttcgtagggcaggccgggctccagcccgcagatgtcctctagtgtcaggctgctgcgctcccgcaggcccttggagcgctccgacttgtccttgtagaccagcatcagcaggcagtctgccacgggcgacggcttgcgcagcaccagccacctactcttccacttcttgccgtcccgcagcttgacctggccctccaccagcgccgcctcggtcatcttctgtcatggttccgcgccgccgcgctcgccccggcgccccagcccagggtcactttcaaaatagctcccagggccctgggctgggccaggagggcgggcccgcgggca

SEQ ID NO: 299 - RNA, 3860 nt, Macaca mulatta
  source 1..3860: mol_type = mRNA
cgcccgcgccggccctggagtcgccggtgtcgccgccctgcccgcgggcccgccctcctggcccagcccagggccctgggagctattttgaaagtgaccctgggctggggcgccggggcgagcgcggcggcgcggaaccatgacagaagatgaccgaggcggcgctggtggagggccaggtcaagctgcgggacggcaagaagtggaagagtaggtggctggtgctgcgcaagccgtcgcccgtggcagactgcctgctgatgctggtctacaaggacaagtcggagcgctccaagggcctgcgggagcgcagcagcctgacactagaggacatctgcgggctggagcccggcctgccctacgaaggcctggcccacacgctggccatcgtctgcctgtcccaggctgtcatgctgggcttcgacagccacgaggccatgtgtgcgtgggatgcccggatccgctatgcgctaggcgaggtgcacaggttccatgtgacagtggctccaggcaccaagttggagagcggcccggccaccctgcacctctgcaatgacatcctcgtcttggccagggacatccccccggctgtcacggggcagtggaagctgtccgacctccggcgctacggggccgtgccgagcggattcatctttgaaggcgggaccaggtgtgggtactgggctggtgtcttcttcctgtcctcggccgagggggagcagatcagcttcctgttcgactgcatcgtccgaggcatctcccccaccaagggcccctttgggctgcggccggttctcccagacccaagtcccccgggaccctcgactgtggaggagcgcgtggcccaggaagccttggaaaccctgcagctggagaagcggctgagcctcctctcgcatgcaggccggccgggcagtggaggggatgaccgcagcctgtccagctcatcctcggaggccagccacttggacgtcagcgccagcagccggctcaccgcatggccagagcagtccttgtcgtcggccagcacgtcgcaggaggggcctagaccagcagctgcccaggcccccggggaagccatgctgggtgcctcaaggccacctcccaagccgctgcggccacggcagctgcaggaggtcggccgccagagctcctcggacagcggcatcgccactggcagccactcctcctactccggcagcctctcgtcctatgcgggcagcagcctggacgtgtggcgggccacggacgaactgggctcactgctcagcctgccagcagccggggcgcccgagcccagcctgtgcgcctgcctgcctggggccgtcgagtaccaggtgcccacctccctgaggccccactacgacacaccacgcagccttcgcctggttcccagggaccacagccccgcctcgcagggcagccccggcgacagtgcggccggggactcaggcggccagacgtccgccgggtgtccctctggctggctgggcacgagacggcggggcctggtgatggaggccccccagggcagcgaggccacactgcccagcccggcccccggagagccctgggaagcaggcagcccccacgcggggccatccccggctttcttttcggcatgtccagtctgtggaggactcaagggagtggccgcctcagccccgggacccgtgacagcacattcaggatccccaggacccgtggctgtggacagcccagggccagagaggccacgcggcgagccacctgcttacgtgaacatccccgtcagccccccctccgggaagcagctgcactacatgggcctggagctccaggaggccagcgagggggtccgaggggccagcgcctccctctacgcccagattgacatcgcggccactgagatggcgcacaaagtgggagcgcagcacgcacgggcccgggaggagcagctgtcagagctggagcagaggaaggcagccccgcagtgaagctgcaacgccaggagctgaccacaaacctggcccccgggccacctcgtggcccccagcaggctggccccttctattggtcgtggcctgatccccagggagcccccagtcacaggagagggcatggccggtctccgggccacaatgcgaacaggaagatgtctccagggcccacagccaggcctccggcctcacgagtgctgggggttgacacttcctttggcctgaatgagtcgctctggaccccaggccacctgaggccccgcttccaggcatcaggcagctctggttgctgttgcgcgtctcaggcagaggctgctgcccaggagtgtttgggagcatggtttgtggtgcctggcatgcaaaccgccctctcaccctgggggtgactgcacggatgacagccgtgtcctggcaaaacgctcatcgcttcacctgggtgttgtggccccacagcgccaggacccagtgcccgctcacactgtcggcaccacgcccactcctgagactggcggctcagacacttccggcgtcccctccccatctcccggctgtcctgcctgggccaccgcagccctgtgcctggggacggagcctggactcttccagccgcctgactgctgcacttcttgggacacattgcagtcagtcatgtaaagagcttaaaattctgactgctctgttcctgacaatgcctactttctctctcctggtttctgctcttggacgtggatctgatgtcttcacctggggatgcttggggttgaggcgagcagagctgccttccttggtggcttcctcctgcgtcagtgcggtgctgtggcttgggggttggtgaactgatggggctgtgtgtgtaggtggtgggcgtcctgcgtgccctcaactcctgtggcaggaggaagcaccgggcggcccctgccttgctcccggagatgggctttctgctctgcaagtctccacccatatctgtccgctttcatattcctgcctgtccttcccctgcccctcccctcccctagcagcccatcaaggacctggagagtctgtggttggcctgccccgggggacggcaggcagctgccactgctgctcagtggggccctcagtgggcaggctcagagcactggccctcctggcgcccccactctgcatgtgactgctgaggatgcttggtgtcaaggtggcagcatgcagggtcaacccggagccagctggagccaggacagagatcccctgcttagacgcaaaggccctggggagcgttctgacagacagggcagggctgggctctcagcctggaggatccgtggacaagactttcagctgcacgttggggcaaggcatggcctgcaccctggtccagggttgcagccgtgtcgggcccttagggtggcagagttgagatgtccacctccagggctggccgcatgcaccagctcagacacgcaacctgggtggcacagccccacccctccccatgaccctggcctgctggagctcgggcttcctgttcacaaagtgggagaaactgtcagtccctctgctgctgatgggatcgtggtgctgcgggggagggtttggagcccagacccagtgtgtctgggtgtgccttgggccacacccttttggcacaatggagtggccaggccatgtcctggggaaacggccgcatgaagagtgtggatgtggggctggggctggtcccacggctgtgggaagccaggaagcaggggtcagagtcagacctggccagggcaccacgggtgggagtatggggcccaggtacacccaggcctctagcagagtgcccggggaggctgtgatggcccacgctgtacccggcgcccgtggtgccctggccagggtcccacttgtgtggtg

SEQ ID NO: 300 - RNA, 3860 nt, Macaca mulatta
  source 1..3860: mol_type = mRNA
caccacacaagtgggaccctggccagggcaccacgggcgccgggtacagcgtgggccatcacagcctccccgggcactctgctagaggcctgggtgtacctgggccccatactcccacccgtggtgccctggccaggtctgactctgacccctgcttcctggcttcccacagccgtgggaccagccccagccccacatccacactcttcatgcggccgtttccccaggacatggcctggccactccattgtgccaaaagggtgtggcccaaggcacacccagacacactgggtctgggctccaaaccctcccccgcagcaccacgatcccatcagcagcagagggactgacagtttctcccactttgtgaacaggaagcccgagctccagcaggccagggtcatggggaggggtggggctgtgccacccaggttgcgtgtctgagctggtgcatgcggccagccctggaggtggacatctcaactctgccaccctaagggcccgacacggctgcaaccctggaccagggtgcaggccatgccttgccccaacgtgcagctgaaagtcttgtccacggatcctccaggctgagagcccagccctgccctgtctgtcagaacgctccccagggcctttgcgtctaagcaggggatctctgtcctggctccagctggctccgggttgaccctgcatgctgccaccttgacaccaagcatcctcagcagtcacatgcagagtgggggcgccaggagggccagtgctctgagcctgcccactgagggccccactgagcagcagtggcagctgcctgccgtcccccggggcaggccaaccacagactctccaggtccttgatgggctgctaggggaggggaggggcaggggaaggacaggcaggaatatgaaagcggacagatatgggtggagacttgcagagcagaaagcccatctccgggagcaaggcaggggccgcccggtgcttcctcctgccacaggagttgagggcacgcaggacgcccaccacctacacacacagccccatcagttcaccaacccccaagccacagcaccgcactgacgcaggaggaagccaccaaggaaggcagctctgctcgcctcaaccccaagcatccccaggtgaagacatcagatccacgtccaagagcagaaaccaggagagagaaagtaggcattgtcaggaacagagcagtcagaattttaagctctttacatgactgactgcaatgtgtcccaagaagtgcagcagtcaggcggctggaagagtccaggctccgtccccaggcacagggctgcggtggcccaggcaggacagccgggagatggggaggggacgccggaagtgtctgagccgccagtctcaggagtgggcgtggtgccgacagtgtgagcgggcactgggtcctggcgctgtggggccacaacacccaggtgaagcgatgagcgttttgccaggacacggctgtcatccgtgcagtcacccccagggtgagagggcggtttgcatgccaggcaccacaaaccatgctcccaaacactcctgggcagcagcctctgcctgagacgcgcaacagcaaccagagctgcctgatgcctggaagcggggcctcaggtggcctggggtccagagcgactcattcaggccaaaggaagtgtcaacccccagcactcgtgaggccggaggcctggctgtgggccctggagacatcttcctgttcgcattgtggcccggagaccggccatgccctctcctgtgactgggggctccctggggatcaggccacgaccaatagaaggggccagcctgctgggggccacgaggtggcccgggggccaggtttgtggtcagctcctggcgttgcagcttcactgcggggctgccttcctctgctccagctctgacagctgctcctcccgggcccgtgcgtgctgcgctcccactttgtgcgccatctcagtggccgcgatgtcaatctgggcgtagagggaggcgctggcccctcggaccccctcgctggcctcctggagctccaggcccatgtagtgcagctgcttcccggagggggggctgacggggatgttcacgtaagcaggtggctcgccgcgtggcctctctggccctgggctgtccacagccacgggtcctggggatcctgaatgtgctgtcacgggtcccggggctgaggcggccactcccttgagtcctccacagactggacatgccgaaaagaaagccggggatggccccgcgtgggggctgcctgcttcccagggctctccgggggccgggctgggcagtgtggcctcgctgccctggggggcctccatcaccaggccccgccgtctcgtgcccagccagccagagggacacccggcggacgtctggccgcctgagtccccggccgcactgtcgccggggctgccctgcgaggcggggctgtggtccctgggaaccaggcgaaggctgcgtggtgtgtcgtagtggggcctcagggaggtgggcacctggtactcgacggccccaggcaggcaggcgcacaggctgggctcgggcgccccggctgctggcaggctgagcagtgagcccagttcgtccgtggcccgccacacgtccaggctgctgcccgcataggacgagaggctgccggagtaggaggagtggctgccagtggcgatgccgctgtccgaggagctctggcggccgacctcctgcagctgccgtggccgcagcggcttgggaggtggccttgaggcacccagcatggcttccccgggggcctgggcagctgctggtctaggcccctcctgcgacgtgctggccgacgacaaggactgctctggccatgcggtgagccggctgctggcgctgacgtccaagtggctggcctccgaggatgagctggacaggctgcggtcatcccctccactgcccggccggcctgcatgcgagaggaggctcagccgcttctccagctgcagggtttccaaggcttcctgggccacgcgctcctccacagtcgagggtcccgggggacttgggtctgggagaaccggccgcagcccaaaggggcccttggtgggggagatgcctcggacgatgcagtcgaacaggaagctgatctgctccccctcggccgaggacaggaagaagacaccagcccagtacccacacctggtcccgccttcaaagatgaatccgctcggcacggccccgtagcgccggaggtcggacagcttccactgccccgtgacagccggggggatgtccctggccaagacgaggatgtcattgcagaggtgcagggtggccgggccgctctccaacttggtgcctggagccactgtcacatggaacctgtgcacctcgcctagcgcatagcggatccgggcatcccacgcacacatggcctcgtggctgtcgaagcccagcatgacagcctgggacaggcagacgatggccagcgtgtgggccaggccttcgtagggcaggccgggctccagcccgcagatgtcctctagtgtcaggctgctgcgctcccgcaggcccttggagcgctccgacttgtccttgtagaccagcatcagcaggcagtctgccacgggcgacggcttgcgcagcaccagccacctactcttccacttcttgccgtcccgcagcttgacctggccctccaccagcgccgcctcggtcatcttctgtcatggttccgcgccgccgcgctcgccccggcgccccagcccagggtcactttcaaaatagctcccagggccctgggctgggccaggagggcgggcccgcgggcagggcggcgacaccggcgactccagggccggcgcgggcg

SEQ ID NO: 301 - RNA, 8155 nt, Homo sapiens
  source 1..8155: mol_type = mRNA
agcgtcggctctggcagcactggaggcggcggcggcccgagggcgacttgcggggcgcgcaggccgccgtgcacccgggacgcttccccctcggggaccctccgcgggcttctccgccgcgccgtccggcgggagccggcgggaccccgggcgagcggcgcgggcggcaccatgaggcggcagtggggcgcgctgctgcttggcgccctgctctgcgcacacggcctggccagcagccccgagtgtgcttgtggtcggagccacttcacatgtgcagtgagtgctcttggagagtgtacctgcatccctgcccagtggcagtgtgatggagacaatgactgcggggaccacagcgatgaggatggatgtatactacctacctgttcccctcttgactttcactgtgacaatggcaagtgcatccgccgctcctgggtgtgtgacggggacaacgactgtgaggatgactcggatgagcaggactgtcccccccgggagtgtgaggaggacgagtttccctgccagaatggctactgcatccggagtctgtggcactgcgatggtgacaatgactgtggcgacaacagcgatgagcagtgtgacatgcgcaagtgctccgacaaggagttccgctgtagtgacggaagctgcattgctgagcattggtactgcgacggtgacaccgactgcaaagatggctccgatgaggagaactgtccctcagcagtgccagcgcccccctgcaacctggaggagttccagtgtgcctatggacgctgcatcctcgacatctaccactgcgatggcgacgatgactgtggagactggtcagacgagtctgactgctcctcccaccagccctgccgctctggggagttcatgtgtgacagtggcctgtgcatcaatgcaggctggcgctgcgatggtgacgcggactgtgatgaccagtctgatgagcgcaactgcaccacctccatgtgtacggcagaacagttccgctgtcactcaggccgctgtgtccgcctgtcctggcgctgtgatggggaggacgactgtgcagacaacagcgatgaagagaactgtgagaatacaggaagcccccaatgtgccttggaccagttcctgtgttggaatgggcgctgcattgggcagaggaagctgtgcaacggggtcaacgactgtggtgacaacagcgacgaaagcccacagcagaattgccggccccggacgggtgaggagaactgcaatgttaacaacggtggctgtgcccagaagtgccagatggtgcggggggcagtgcagtgtacctgccacacaggctaccggctcacagaggatgggcacacgtgccaagatgtgaatgaatgtgccgaggaggggtattgcagccagggctgcaccaacagcgaaggggctttccaatgctggtgtgaaacaggctatgaactacggcccgaccggcgcagctgcaaggctctggggccagagcctgtgctgctgttcgccaatcgcatcgacatccggcaggtgctgccacaccgctctgagtacacactgctgcttaacaacctggagaatgccattgcccttgatttccaccaccgccgcgagcttgtcttctggtcagatgtcaccctggaccggatcctccgtgccaacctcaacggcagcaacgtggaggaggttgtgtctactgggctggagagcccagggggcctggctgtggattgggtccatgacaaactctactggaccgactcaggcacctcgaggattgaggtggccaatctggatggggcccaccggaaagtgttgctgtggcagaacctggagaagccccgggccattgccttgcatcccatggagggtaccatttactggacagactggggcaacaccccccgtattgaggcctccagcatggatggctctggacgccgcatcattgccgatacccatctcttctggcccaatggcctcaccatcgactatgccgggcgccgtatgtactgggtggatgctaagcaccatgtcatcgagagggccaatctggatgggagtcaccgtaaggctgtcattagccagggcctcccgcatcccttcgccatcacagtgtttgaagacagcctgtactggacagactggcacaccaagagcatcaatagcgctaacaaatttacggggaagaaccaggaaatcattcgcaacaaactccacttccctatggacatccacaccttgcacccccagcgccaacctgcagggaaaaaccgctgtggggacaacaacggaggctgcacgcacctgtgtctgcccagtggccagaactacacctgtgcctgccccactggcttccgcaagatcagcagccacgcctgtgcccagagtcttgacaagttcctgctttttgcccgaaggatggacatccgtcgaatcagctttgacacagaggacctgtctgatgatgtcatcccactggctgacgtgcgcagtgctgtggcccttgactgggactcccgggatgaccacgtgtactggacagatgtcagcactgataccatcagcagggccaagtgggatggaacaggacaggaggtggtagtggataccagtttggagagcccagctggcctggccattgattgggtcaccaacaaactgtactggacagatgcaggtacagaccggattgaagtagccaacacagatggcagcatgagaacagtactcatctgggagaaccttgatcgtcctcgggacatcgtggtggaacccatgggcgggtacatgtattggactgactggggtgcgagccccaagattgaacgagctggcatggatgcctcaggccgccaagtcattatctcttctaatctgacctggcctaatgggttagctattgattatgggtcccagcgtctatactgggctgacgccggcatgaagacaattgaatttgctggactggatggcagtaagaggaaggtgctgattggaagccagctcccccacccatttgggctgaccctctatggagagcgcatctattggactgactggcagaccaagagcatacagagcgctgaccggctgacagggctggaccgggagactctgcaggagaacctggaaaacctaatggacatccatgtcttccaccgccgccggcccccagtgtctacaccatgtgctatggagaatggcggctgtagccacctgtgtcttaggtccccaaatccaagcggattcagctgtacctgccccacaggcatcaacctgctgtctgatggcaagacctgctcaccaggcatgaacagtttcctcatcttcgccaggaggatagacattcgcatggtctccctggacatcccttattttgctgatgtggtggtaccaatcaacattaccatgaagaacaccattgccattggagtagacccccaggaaggaaaggtgtactggtctgacagcacactgcacaggatcagtcgtgccaatctggatggctcacagcatgaggacatcatcaccacagggctacagaccacagatgggctcgcggttgatgccattggccggaaagtatactggacagacacgggaacaaaccggattgaagtgggcaacctggacgggtccatgcggaaagtgttggtgtggcagaaccttgacagtccccgggccatcgtactgtaccatgagatggggtttatgtactggacagactggggggagaatgccaagttagagcggtccggaatggatggctcagaccgcgcggtgctcatcaacaacaacctaggatggcccaatggactgactgtggacaaggccagctcccaactgctatgggccgatgcccacaccgagcgaattgaggctgctgacctgaatggtgccaatcggcatacattggtgtcaccggtgcagcacccatatggcctcaccctgctcgactcctatatctactggactgactggcagactcggagcatccaccgtgctgacaagggtactggcagcaatgtcatcctcgtgaggtccaacctgccaggcctcatggacatgcaggctgtggaccgggcacagccactaggttttaacaagtgcggctcgagaaatggcggctgctcccacctctgcttgcctcggccttctggcttctcctgtgcctgccccactggcatccagctgaagggagatgggaagacctgtgatccctctcctgagacctacctgctcttctccagccgtggctccatccggcgtatctcactggacaccagtgaccacaccgatgtgcatgtccctgttcctgagctcaacaatgtcatctccctggactatgacagcgtggatggaaaggtctattacacagatgtgttcctggatgttatcaggcgagcagacctgaacggcagcaacatggagacagtgatcgggcgagggctgaagaccactgacgggctggcagtggactgggtggccaggaacctgtactggacagacacaggtcgaaataccattgaggcgtccaggctggatggttcctgccgcaaagtactgatcaacaatagcctggatgagccccgggccattgctgttttccccaggaaggggtacctcttctggacagactggggccacattgccaagatcgaacgggcaaacttggatggttctgagcggaaggtcctcatcaacacagacctgggttggcccaatggccttaccctggactatgatacccgcaggatctactgggtggatgcgcatctggaccggatcgagagtgctgacctcaatgggaaactgcggcaggtcttggtcagccatgtgtcccacccctttgccctcacacagcaagacaggtggatctactggacagactggcagaccaagtcaatccagcgtgttgacaaatactcaggccggaacaaggagacagtgctggcaaatgtggaaggactcatggatatcatcgtggtttcccctcagcggcagacagggaccaatgcctgtggtgtgaacaatggtggctgcacccacctctgctttgccagagcctcggacttcgtatgtgcctgtcctgacgaacctgatagccggccctgctcccttgtgcctggcctggtaccaccagctcctagggctactggcatgagtgaaaagagcccagtgctacccaacacaccacctaccaccttgtattcttcaaccacccggacccgcacgtctctggaggaggtggaaggaagatgctctgaaagggatgccaggctgggcctctgtgcacgttccaatgacgctgttcctgctgctccaggggaaggacttcatatcagctacgccattggtggactcctcagtattctgctgattttggtggtgattgcagctttgatgctgtacagacacaaaaaatccaagttcactgatcctggaatggggaacctcacctacagcaacccctcctaccgaacatccacacaggaagtgaagattgaagcaatccccaaaccagccatgtacaaccagctgtgctataagaaagagggagggcctgaccataactacaccaaggagaagatcaagatcgtagagggaatctgcctcctgtctggggatgatgctgagtgggatgacctcaagcaactgcgaagctcacgggggggcctcctccgggatcatgtatgcatgaagacagacacggtgtccatccaggccagctctggctccctggatgacacagagacggagcagctgttacaggaagagcagtctgagtgtagcagcgtccatactgcagccactccagaaagacgaggctctctgccagacacgggctggaaacatgaacgcaagctctcctcagagagccaggtctaaatgcccacattctcttccctgcctgcctgttccttctcctttatggacgtctagtccttgtgctcgcttacaccgcaggccccgcttctgtgtgcttgtcctcctcctcctcccaccccataactgttcctaagccttcaccggagctgtttaccacgtgagtccataactacctgtgcacaagaaatgatggcacatcacgagaatttagacctggattttaccatgaacctcacatcttgtactccatcctgggccccctgaaactgcttattcgtgattcctcaccagcgtagagctccacctcccctttccccagtaccctcagtgcctgcttctcagtgctgatgcagctgatgacccaggactgcgctctgccccatcacagccagcatgactgcttctctgagagaacttgcccatcaggggctgggacatgggggtgtgggtaaagacagggatgaaggatagaggctgagagaagaaggaagaatcagcccagcaggtatgggcatctgggaaacctccagcctcaagtgtgttagtaacatgaaaaagctttggggggtagttggatctgggtgtctggtccattgctggcagtggacattattcttgccctaagagacactgccttttcagcagcagatactggtgagatgggggtggctcaggctgttcttcctcctcctagaatgtctggagctgtttctacattcagataactgggtcccctatcacaaggctactggctaataggaattccctcctggtgccaccactggccagtacctttcctaagtctttgctcaaattaaccaggttgtgagccagtggcttgagtgaatgttaggccttgggggctgagtctctgaaaagtctaagaagctctgcctagaccaaatatggtatacctcctgacccctctctccctcatgtcctgggattctggggaagagacctagaaacaagctttcaaagaaaaaccagaagttgtcataaatggtcagaaagaacgatcaggttggagacttgggaaacccagggcctaaagagaagtatccatgagggtcaaacttcctgttgaacttcctatgttctttctcaagtgctcagggatctaagttagtggacagcaagcctgtggctacggggtggtgatgttcctcttccagctgtcccctcagctaaggggcttagtttccatgtgggatgccatcacttggttcatgctcattcacacaaagggcacgtgtctcagcctggtatcagggaaattgagacttatttttgccctaaaacgtctccctagctgttcttcgtggggtttttttgtttgtttttttgcctaatttgctttttctgaccaagccttgtggcaccagcaatctccaaagtcctgtggtgggagggctgaataaataaaaatacaaagaggtgggtaaggagtaggaaggtagagagcaccactgatgaggccctcctagcccatggcagacccagacctcttctcccccaggaattagaagtggcaggagagaacaacaggggctgggaatggaggggagaatttctaggggaagtttcctgagttgaaacttctcctgtggttactggtattgagaaatcagctaccaaagtgaaaaaggacaagatcaattcttttctagtcagttctaagactgctagagagagataccaggcccttagccttgctctcagtagcgtcagccccagttctgagcctccccacattacacttaacaagcagtaaaggagtgagcactttgggtccttagactcacgtctggggaggaagagcaagtagaaaagtggcattttcttgattggaaagggggaaggatcttattgcacttgggctgttcagaatgtagaaaggacatatttgaggaagtatctatttgagcactgatttactctgtaaaaagcaaaatctctctgtcctaaactaatggaagcgattctcccatgctcatgtgtaatggttttaacgttactcactggagagattggactttctggagttatttaaccactatgttcagtattttaggactttatgataatttaatataaatttagcttttcttaatcaccttgcctggcttggagtcatgactaatcctgcacctgctctgtctggcagacccatgctgtggaaaacctgcttacagacatcacttttaagtcctttgtggatgtgggcacagtgaagagcaataaagagtgtgaggttcctgctgga

SEQ ID NO: 302 - RNA, 8155 nt, Homo sapiens
  source 1..8155: mol_type = mRNA
tccagcaggaacctcacactctttattgctcttcactgtgcccacatccacaaaggacttaaaagtgatgtctgtaagcaggttttccacagcatgggtctgccagacagagcaggtgcaggattagtcatgactccaagccaggcaaggtgattaagaaaagctaaatttatattaaattatcataaagtcctaaaatactgaacatagtggttaaataactccagaaagtccaatctctccagtgagtaacgttaaaaccattacacatgagcatgggagaatcgcttccattagtttaggacagagagattttgctttttacagagtaaatcagtgctcaaatagatacttcctcaaatatgtcctttctacattctgaacagcccaagtgcaataagatccttccccctttccaatcaagaaaatgccacttttctacttgctcttcctccccagacgtgagtctaaggacccaaagtgctcactcctttactgcttgttaagtgtaatgtggggaggctcagaactggggctgacgctactgagagcaaggctaagggcctggtatctctctctagcagtcttagaactgactagaaaagaattgatcttgtcctttttcactttggtagctgatttctcaataccagtaaccacaggagaagtttcaactcaggaaacttcccctagaaattctcccctccattcccagcccctgttgttctctcctgccacttctaattcctgggggagaagaggtctgggtctgccatgggctaggagggcctcatcagtggtgctctctaccttcctactccttacccacctctttgtatttttatttattcagccctcccaccacaggactttggagattgctggtgccacaaggcttggtcagaaaaagcaaattaggcaaaaaaacaaacaaaaaaaccccacgaagaacagctagggagacgttttagggcaaaaataagtctcaatttccctgataccaggctgagacacgtgccctttgtgtgaatgagcatgaaccaagtgatggcatcccacatggaaactaagccccttagctgaggggacagctggaagaggaacatcaccaccccgtagccacaggcttgctgtccactaacttagatccctgagcacttgagaaagaacataggaagttcaacaggaagtttgaccctcatggatacttctctttaggccctgggtttcccaagtctccaacctgatcgttctttctgaccatttatgacaacttctggtttttctttgaaagcttgtttctaggtctcttccccagaatcccaggacatgagggagagaggggtcaggaggtataccatatttggtctaggcagagcttcttagacttttcagagactcagcccccaaggcctaacattcactcaagccactggctcacaacctggttaatttgagcaaagacttaggaaaggtactggccagtggtggcaccaggagggaattcctattagccagtagccttgtgataggggacccagttatctgaatgtagaaacagctccagacattctaggaggaggaagaacagcctgagccacccccatctcaccagtatctgctgctgaaaaggcagtgtctcttagggcaagaataatgtccactgccagcaatggaccagacacccagatccaactaccccccaaagctttttcatgttactaacacacttgaggctggaggtttcccagatgcccatacctgctgggctgattcttccttcttctctcagcctctatccttcatccctgtctttacccacacccccatgtcccagcccctgatgggcaagttctctcagagaagcagtcatgctggctgtgatggggcagagcgcagtcctgggtcatcagctgcatcagcactgagaagcaggcactgagggtactggggaaaggggaggtggagctctacgctggtgaggaatcacgaataagcagtttcagggggcccaggatggagtacaagatgtgaggttcatggtaaaatccaggtctaaattctcgtgatgtgccatcatttcttgtgcacaggtagttatggactcacgtggtaaacagctccggtgaaggcttaggaacagttatggggtgggaggaggaggaggacaagcacacagaagcggggcctgcggtgtaagcgagcacaaggactagacgtccataaaggagaaggaacaggcaggcagggaagagaatgtgggcatttagacctggctctctgaggagagcttgcgttcatgtttccagcccgtgtctggcagagagcctcgtctttctggagtggctgcagtatggacgctgctacactcagactgctcttcctgtaacagctgctccgtctctgtgtcatccagggagccagagctggcctggatggacaccgtgtctgtcttcatgcatacatgatcccggaggaggcccccccgtgagcttcgcagttgcttgaggtcatcccactcagcatcatccccagacaggaggcagattccctctacgatcttgatcttctccttggtgtagttatggtcaggccctccctctttcttatagcacagctggttgtacatggctggtttggggattgcttcaatcttcacttcctgtgtggatgttcggtaggaggggttgctgtaggtgaggttccccattccaggatcagtgaacttggattttttgtgtctgtacagcatcaaagctgcaatcaccaccaaaatcagcagaatactgaggagtccaccaatggcgtagctgatatgaagtccttcccctggagcagcaggaacagcgtcattggaacgtgcacagaggcccagcctggcatccctttcagagcatcttccttccacctcctccagagacgtgcgggtccgggtggttgaagaatacaaggtggtaggtggtgtgttgggtagcactgggctcttttcactcatgccagtagccctaggagctggtggtaccaggccaggcacaagggagcagggccggctatcaggttcgtcaggacaggcacatacgaagtccgaggctctggcaaagcagaggtgggtgcagccaccattgttcacaccacaggcattggtccctgtctgccgctgaggggaaaccacgatgatatccatgagtccttccacatttgccagcactgtctccttgttccggcctgagtatttgtcaacacgctggattgacttggtctgccagtctgtccagtagatccacctgtcttgctgtgtgagggcaaaggggtgggacacatggctgaccaagacctgccgcagtttcccattgaggtcagcactctcgatccggtccagatgcgcatccacccagtagatcctgcgggtatcatagtccagggtaaggccattgggccaacccaggtctgtgttgatgaggaccttccgctcagaaccatccaagtttgcccgttcgatcttggcaatgtggccccagtctgtccagaagaggtaccccttcctggggaaaacagcaatggcccggggctcatccaggctattgttgatcagtactttgcggcaggaaccatccagcctggacgcctcaatggtatttcgacctgtgtctgtccagtacaggttcctggccacccagtccactgccagcccgtcagtggtcttcagccctcgcccgatcactgtctccatgttgctgccgttcaggtctgctcgcctgataacatccaggaacacatctgtgtaatagacctttccatccacgctgtcatagtccagggagatgacattgttgagctcaggaacagggacatgcacatcggtgtggtcactggtgtccagtgagatacgccggatggagccacggctggagaagagcaggtaggtctcaggagagggatcacaggtcttcccatctcccttcagctggatgccagtggggcaggcacaggagaagccagaaggccgaggcaagcagaggtgggagcagccgccatttctcgagccgcacttgttaaaacctagtggctgtgcccggtccacagcctgcatgtccatgaggcctggcaggttggacctcacgaggatgacattgctgccagtacccttgtcagcacggtggatgctccgagtctgccagtcagtccagtagatataggagtcgagcagggtgaggccatatgggtgctgcaccggtgacaccaatgtatgccgattggcaccattcaggtcagcagcctcaattcgctcggtgtgggcatcggcccatagcagttgggagctggccttgtccacagtcagtccattgggccatcctaggttgttgttgatgagcaccgcgcggtctgagccatccattccggaccgctctaacttggcattctccccccagtctgtccagtacataaaccccatctcatggtacagtacgatggcccggggactgtcaaggttctgccacaccaacactttccgcatggacccgtccaggttgcccacttcaatccggtttgttcccgtgtctgtccagtatactttccggccaatggcatcaaccgcgagcccatctgtggtctgtagccctgtggtgatgatgtcctcatgctgtgagccatccagattggcacgactgatcctgtgcagtgtgctgtcagaccagtacacctttccttcctgggggtctactccaatggcaatggtgttcttcatggtaatgttgattggtaccaccacatcagcaaaataagggatgtccagggagaccatgcgaatgtctatcctcctggcgaagatgaggaaactgttcatgcctggtgagcaggtcttgccatcagacagcaggttgatgcctgtggggcaggtacagctgaatccgcttggatttggggacctaagacacaggtggctacagccgccattctccatagcacatggtgtagacactgggggccggcggcggtggaagacatggatgtccattaggttttccaggttctcctgcagagtctcccggtccagccctgtcagccggtcagcgctctgtatgctcttggtctgccagtcagtccaatagatgcgctctccatagagggtcagcccaaatgggtgggggagctggcttccaatcagcaccttcctcttactgccatccagtccagcaaattcaattgtcttcatgccggcgtcagcccagtatagacgctgggacccataatcaatagctaacccattaggccaggtcagattagaagagataatgacttggcggcctgaggcatccatgccagctcgttcaatcttggggctcgcaccccagtcagtccaatacatgtacccgcccatgggttccaccacgatgtcccgaggacgatcaaggttctcccagatgagtactgttctcatgctgccatctgtgttggctacttcaatccggtctgtacctgcatctgtccagtacagtttgttggtgacccaatcaatggccaggccagctgggctctccaaactggtatccactaccacctcctgtcctgttccatcccacttggccctgctgatggtatcagtgctgacatctgtccagtacacgtggtcatcccgggagtcccagtcaagggccacagcactgcgcacgtcagccagtgggatgacatcatcagacaggtcctctgtgtcaaagctgattcgacggatgtccatccttcgggcaaaaagcaggaacttgtcaagactctgggcacaggcgtggctgctgatcttgcggaagccagtggggcaggcacaggtgtagttctggccactgggcagacacaggtgcgtgcagcctccgttgttgtccccacagcggtttttccctgcaggttggcgctgggggtgcaaggtgtggatgtccatagggaagtggagtttgttgcgaatgatttcctggttcttccccgtaaatttgttagcgctattgatgctcttggtgtgccagtctgtccagtacaggctgtcttcaaacactgtgatggcgaagggatgcgggaggccctggctaatgacagccttacggtgactcccatccagattggccctctcgatgacatggtgcttagcatccacccagtacatacggcgcccggcatagtcgatggtgaggccattgggccagaagagatgggtatcggcaatgatgcggcgtccagagccatccatgctggaggcctcaatacggggggtgttgccccagtctgtccagtaaatggtaccctccatgggatgcaaggcaatggcccggggcttctccaggttctgccacagcaacactttccggtgggccccatccagattggccacctcaatcctcgaggtgcctgagtcggtccagtagagtttgtcatggacccaatccacagccaggccccctgggctctccagcccagtagacacaacctcctccacgttgctgccgttgaggttggcacggaggatccggtccagggtgacatctgaccagaagacaagctcgcggcggtggtggaaatcaagggcaatggcattctccaggttgttaagcagcagtgtgtactcagagcggtgtggcagcacctgccggatgtcgatgcgattggcgaacagcagcacaggctctggccccagagccttgcagctgcgccggtcgggccgtagttcatagcctgtttcacaccagcattggaaagccccttcgctgttggtgcagccctggctgcaatacccctcctcggcacattcattcacatcttggcacgtgtgcccatcctctgtgagccggtagcctgtgtggcaggtacactgcactgccccccgcaccatctggcacttctgggcacagccaccgttgttaacattgcagttctcctcacccgtccggggccggcaattctgctgtgggctttcgtcgctgttgtcaccacagtcgttgaccccgttgcacagcttcctctgcccaatgcagcgcccattccaacacaggaactggtccaaggcacattgggggcttcctgtattctcacagttctcttcatcgctgttgtctgcacagtcgtcctccccatcacagcgccaggacaggcggacacagcggcctgagtgacagcggaactgttctgccgtacacatggaggtggtgcagttgcgctcatcagactggtcatcacagtccgcgtcaccatcgcagcgccagcctgcattgatgcacaggccactgtcacacatgaactccccagagcggcagggctggtgggaggagcagtcagactcgtctgaccagtctccacagtcatcgtcgccatcgcagtggtagatgtcgaggatgcagcgtccataggcacactggaactcctccaggttgcaggggggcgctggcactgctgagggacagttctcctcatcggagccatctttgcagtcggtgtcaccgtcgcagtaccaatgctcagcaatgcagcttccgtcactacagcggaactccttgtcggagcacttgcgcatgtcacactgctcatcgctgttgtcgccacagtcattgtcaccatcgcagtgccacagactccggatgcagtagccattctggcagggaaactcgtcctcctcacactcccgggggggacagtcctgctcatccgagtcatcctcacagtcgttgtccccgtcacacacccaggagcggcggatgcacttgccattgtcacagtgaaagtcaagaggggaacaggtaggtagtatacatccatcctcatcgctgtggtccccgcagtcattgtctccatcacactgccactgggcagggatgcaggtacactctccaagagcactcactgcacatgtgaagtggctccgaccacaagcacactcggggctgctggccaggccgtgtgcgcagagcagggcgccaagcagcagcgcgccccactgccgcctcatggtgccgcccgcgccgctcgcccggggtcccgccggctcccgccggacggcgcggcggagaagcccgcggagggtccccgagggggaagcgtcccgggtgcacggcggcctgcgcgccccgcaagtcgccctcgggccgccgccgcctccagtgctgccagagccgacgct

SEQ ID NO: 303 - RNA, 8028 nt, Mus musculus
  source 1..8028: mol_type = mRNA
aggaggcagcagcagcccggagggcgacttgcagggcgcgccggccgagctggacccgggacgcttttcaacccgggggaaccctccgctgattctctccgccccggcgtcccttgggagcccgcgggacccccgggccggcagggaacgccggcggcggccgcagcaccatgaggcggtggtggggcgcgctgctgcttggcgccctgctctgcgcacacggaatagccagcagtctggagtgtgcatgtggtcggagccacttcacatgtgcggtgagcgcgcttggcgaatgtacctgtatccccgcccagtggcagtgtgatggagacaatgactgtggagaccacagcgatgaggatggctgtacgctgcctacctgctcccctctggacttccactgtgacaacggcaagtgcatccgacgctcctgggtgtgtgacggggacaatgactgtgaagatgactctgatgagcaggactgtcccccccgggagtgtgaggaggacgaattcccctgccagaacggctactgcattcggagtctgtggcactgtgatggggacaacgactgtggtgacaacagtgacgagcaatgcgacatgcgcaagtgctcagacaaggaattccgctgcagcgacggcagctgcattgctgagcattggtactgcgatggtgacacagactgcaaagatggctctgatgaggaaagctgcccttcagcagtaccctctcctccttgcaacctggaagagttccagtgcgcctatggccgctgcatcctcgacatctaccactgtgacggagatgacgactgtggagactggtcagacgagtctgactgctcctcccaccagccctgccgctctggggaattcatgtgtgacagtggcctgtgcatcaactcgggctggcgctgtgatggtgatgcagactgtgatgaccagtctgatgaacgcaactgcaccacctccatgtgcacagccgaacagtttcgctgtcggtcaggccgttgcgtccgtctgtcctggcgctgtgatggggaggatgactgtgcggacaacagcgatgaagaaaactgtgagaacacaggaagcccccagtgcgcctctgaccagttcctgtgttggaacgggcgctgtattgggcagaggaagctgtgcaacgggatcaacgactgcggtgacagcagtgacgaaagtccacagcagaactgtcggccccggacgggtgaggagaactgcaatgttaacaacggtggctgtgcccagaagtgtcagatggtgcgaggggcagtgcagtgtacctgccacacaggctaccggctcacagaggatgggagaacgtgccaggatgtaaacgaatgtgctgaggaggggtactgcagccagggctgcacaaacactgaaggggctttccagtgctggtgtgaagcagggtatgagctacggcccgatcggcgcagctgcaaagctctggggccagaacctgtgctactgtttgccaatcgtatcgacatccggcaggtgctcccgcaccgctccgagtacacgctgctactgaacaacctggagaacgccattgccctcgactttcatcaccggcgggagctggtcttctggtcggatgtcaccctggaccgcatcctccgtgccaaccttaatggcagcaatgtagaggaggtggtgtctactgggctagagagcccagggggcctagcggtggattgggtccatgacaagctctactggaccgactctgggacgtcgaggattgaggtggctaatctggatggggcccaccggaaggtgctgctatggcagagcctagagaagcccagagccattgccctacaccccatggagggaaccatttattggacagactggggcaacaccccccgcattgaggcctccagcatggacggctctgggcgtcgcatcattgctgacactcatcttttctggcccaacggcctcaccatcgactacgctggtcgccgcatgtactgggtggatgctaagcaccacgtcatcgagagggccaatctagatgggagtcaccgcaaggctgtcattagccagggcctcccacatccctttgccatcacagtgtttgaagacagcttgtattggacagactggcacaccaagagcatcaatagtgccaacaagtttacggggaagaaccaggaaatcattcgcaacaagctccactttcctatggacattcataccttgcacccccagcgccagcccgcagggaaaaaccgctgtggggacaacaatggaggttgcactcacctgtgtctacccagtggccagaactacacctgtgcctgccccaccggcttccgcaagatcaacagccacgcctgtgcccagagtcttgacaagttcctgctttttgcccgaaggatggacatccgtcggatcagcttcgacacagaggacctgtccgacgatgtcatcccactggctgacgtgcgcagtgctgtggcccttgactgggactcccgggatgaccacgtgtattggacagatgtcagcactgataccatcagcagggccaagtgggatggaacaggacaggaggtggtagtggataccagtttggagagccctgctggcctggcaattgattgggtcaccaacaagctctactggacagatgcaggcacggacaggatcgaagtggccaacacagatggcagcatgaggacagtgctcatctgggagaaccttgaccgtcctcgggacatagtggtagagcccatgggcgggtacatgtattggactgactggggtgcaagtcccaagattgaacgggctggcatggacgcctccagccgacaagtcatcatctcttcgaacctgacctggcctaatggattggctattgactacggctctcagcggctgtactgggcggatgccggcatgaagactattgaatttgctgggctggatggcagcaagaggaaggtactaattggaagccagctcccccacccttttgggctgactctatatggacagcgcatctattggactgactggcagaccaagagtatacaaagtgctgaccggctgactgggctagaccgggagactctgcaggagaacctggagaacctcatggacattcatgtcttccaccgccagaggcctccagtgacgacgctgtgtgccgtggagaatggcggctgcagccatttgtgtctcaggtccccaaatccgagcggcttcagctgcacctgccccacaggtatcaacctgctacgagatggcaagacatgctcaccaggcatgaacagtttcctcatcttcgccaggaggattgatgttcgcatggtctccttggatatcccttattttgctgatgtggtggtacccatcaacatgaccatgaagaacaccatcgccattggagtggatccgctggaaggaaaagtgtactggtctgacagcacgctgcacaggatcagccgtgccagcctggatggctcacagcatgaggacatcatcactacaggtctgcagaccacagacgggcttgcagtggatgccatcggccggaaagtgtactggacagacacaggaacgaatcggattgaagttggcaacctggatgggtctatgcggaaagtgttggtgtggcagaaccttgacagtccccgggccattgtattataccatgaaatggggttcatgtactggacagactggggggagaacgccaaattagagcgttccggaatggatggctcagaccgtactgtgctcatcaacaacaacctagggtggcccaatggactgactgtggacaagaccagttcccaactgctgtgggctgatgcccatactgagagaattgaggtggcagacctgaatggcgctaatcggcatacactggtgtcaccagtccagcacccatatggcctcactctgcttgactcctatatctactggactgactggcagacccgcagcatccaccgggccgacaagagtactggcagcaatgtcatccttgtgaggtccaacctgccaggcctcatggacatccaagctgttgaccgggcacagccactgggttttaataaatgtggctcaagaaatggcggctgttcccacctctgtttacctcggccttctggtttctcctgtgcctgtcccactggcattcagctgaagggagacaggaagacctgtgacccctctccagaaacctacctgctcttctctagccgaggctctattcgccgtatctcactggacaccgatgaccacacagacgtgcacgttcctgttcctgggctcaacaatgtcatctccctagactatgacagtgtgcatggaaaggtctattacacagatgtgttcctggatgttatcaggcgagcagacctgaatggcagcaacatggagactgttattggacacgggcttaagaccactgacgggctggcagtggactgggttgccagaaacctgtactggacagataccggccgaaataccatcgaagcatctcggctagatggatcctgtcgcaaagtgctaatcaacaacagtctagacgagccccgggccattgctgttttccccagaaaggggtacctcttctggacagactggggccacattgccaagattgaacgggcaaacctggatggctctgagaggaaggtcctcatcaacacagacctaggctggcccaacggcctcaccttggactatgatacccgcaggatctactgggtagatgcacatctggatcggatcgagagtgctgacctcaatgggaagctgaggcaggtcttggtcagccatgtgtcccacccctttgccctcacacagcaggacaggtggatctactggacggactggcagaccaaatcgatccaacgtgtcgacaagtactcgggccgcaacaaggagacagtactggccaacgtggagggacttatggatattattgtggtgtcccctcagcggcagacagggaccaatgcctgcggtgtgaataatggtggctgtactcacctctgctttgcccgagcctctgactttgtgtgcgcgtgtcctgatgagcctgacggtcatccctgctcccttgtacctggcctcgtacctcctgctcccagagctaccagcatgaatgagaagagcccagtgctacccaacacgctgcccaccaccttacattcttctaccaccaagacccgcacctctctggagggggcaggaggaagatgctctgaaagggatgcccagctgggcctctgtgcacattccaatgaagccgtccctgctgctccaggtgaaggactgcacgtcagctatgccatcggtggactcctcagtatcctgctgattttgttggtgatcgcggctttgatgctatacagacacagaaaatccaagttcacggatcctggaatgggaaacctgacctatagcaacccctcctaccgaacttccactcaggaagtgaaacttgaagcagctcccaagccagccgtgtataatcagctgtgctataagaaagagggtggacctgaccacagctacaccaaggagaagatcaagattgtagagggaatccgcctcctggctggggatgacgctgaatggggtgacctcaagcaactgcgcagctccagggggggccttctacgggatcacgtatgcatgaagacagacacagtgtccatccaggccagctctggctccctagatgacacggagacagagcagctgcttcaggaagagcagtctgagtgtagcagtgttcacactgcagccactccggagagacggggctctctgccagacacaggctggaaacacgaacgcaagctctcctcagaaagccaggtctaagtgctgcccacattctcttccctgcctgcctgttcattctcctctgtggacttctgatccttgtgctcacataacaacgcgggccctttcccatgcacgcatcttcctcctcccaccccaaagtgctcccgagcccccatagaacctgttactcatctgagtccaaaactacctggggacaagaagtgagggcacatctcaagaatttagacctggattttaccatgaacttcacctcttgcactctatcctgggccccctgaagctgggctcagtgtgattccttgtcagcacagagctccgtctccctttgccctggcatcctatgtgcctgccccacagcaccgatgcaattcatgatataagactctggtcttccccatcacagctggcatgatggcctccctgtgaactggcctaccaggggctgggactggaggtcacaggttaaaaggtaatggacagaggttgagagaaggaagaagcagcccagctggtctgggtgcttgggaaacctccagcctcaagtgttggtaattatgaaaaaccttggggggcggggattcgagccctggaatcatgtccattgctggcagtggacattctcctcatccagaagtcactgctttgtcagttgtgatacaggtgaagtgtgggaatggcttaggctcttcttcctcctgctggaatgtctggggccatttctaccttggataactggatagctcctgccatggcaactcactaataggaattccctcctggtgctgtgatgggccgtacttttcttaagcctttagctatgctgtgagcttgagtgaacattgggtgggccttggagagcagacttgtagaacgtttaagaagctctgcaaagaaagcatagcatcctacccgagcttcacctattctactcttctctcttccattctgtgggattctaagggaaacaattctgtcacagcctttcaaagactggctcaacattttcctaaatggtcagaaagagcaactagagagacacaagacacccaggggctcaggaggagaattgtgaggttgaacctcttgagttcattctcaagtgctcagggatccaagttcatggacacagcctgtggctctcgggtggtaaaggtcatgtgccaactcttctcagcccctgtccacactaaagtgccagcattagcttcatgctcctttaggccaagggcttctctcaggggagctgagatttttttttttttttttttttttttttttttgtgctgccctagaatctcatcccagtttttctacttctgagagaggggagtctagccttgctttctctaaccggtcctgtgtcacctcaatcgctaatgtccaatgatgaggagggtcagtgaagatgtaaagtggtaagcaaggagtggagaggtggtgagaaccagtccagagcaagttcaggcacttctccatagaaaccgaagcacaggagagattggcaggtgctgagaatggaggagaggacttttaggggaagtttcctgacataaaacatctttcatggtttattgctattcagagatcagcagccaggcatcgcatgaacaaacaagatcaaatcttttctggtcagttattacgagtaagagacagatgtcaaaccattagtcttgttgtcattagctaggcccagatatatgtctgcacacagagccagagcaggccaatggccttttccagtaaaccaattgagaaaagtacagtgccacttctaagaggaaagatggacatttcacacagaatgaggcagcacttgagcctttaaatccatagttggggaggagggggggggggggaaacagaagcgtggtgtcctcctgagtggaaaggggcaaggatctttttgcacttgggctgttcagaatgtagaaaggacgaatttgaggaaatatctatttgagcactgatttactctgtaaaaagggcaaaaatctctctgtcctaaactaatggaagcgattttcccatgctcatgtgtaatgattttaacattactcactggagagattggactttctggagttatttaaccactatgttcagtattttagggctttatgataatttaatataaatttagctttcttaatta

SEQ ID NO: 304 - RNA, 8028 nt, Mus musculus
  source 1..8028: mol_type = mRNA
taattaagaaagctaaatttatattaaattatcataaagccctaaaatactgaacatagtggttaaataactccagaaagtccaatctctccagtgagtaatgttaaaatcattacacatgagcatgggaaaatcgcttccattagtttaggacagagagatttttgccctttttacagagtaaatcagtgctcaaatagatatttcctcaaattcgtcctttctacattctgaacagcccaagtgcaaaaagatccttgcccctttccactcaggaggacaccacgcttctgtttccccccccccccctcctccccaactatggatttaaaggctcaagtgctgcctcattctgtgtgaaatgtccatctttcctcttagaagtggcactgtacttttctcaattggtttactggaaaaggccattggcctgctctggctctgtgtgcagacatatatctgggcctagctaatgacaacaagactaatggtttgacatctgtctcttactcgtaataactgaccagaaaagatttgatcttgtttgttcatgcgatgcctggctgctgatctctgaatagcaataaaccatgaaagatgttttatgtcaggaaacttcccctaaaagtcctctcctccattctcagcacctgccaatctctcctgtgcttcggtttctatggagaagtgcctgaacttgctctggactggttctcaccacctctccactccttgcttaccactttacatcttcactgaccctcctcatcattggacattagcgattgaggtgacacaggaccggttagagaaagcaaggctagactcccctctctcagaagtagaaaaactgggatgagattctagggcagcacaaaaaaaaaaaaaaaaaaaaaaaaaaaaaaatctcagctcccctgagagaagcccttggcctaaaggagcatgaagctaatgctggcactttagtgtggacaggggctgagaagagttggcacatgacctttaccacccgagagccacaggctgtgtccatgaacttggatccctgagcacttgagaatgaactcaagaggttcaacctcacaattctcctcctgagcccctgggtgtcttgtgtctctctagttgctctttctgaccatttaggaaaatgttgagccagtctttgaaaggctgtgacagaattgtttcccttagaatcccacagaatggaagagagaagagtagaataggtgaagctcgggtaggatgctatgctttctttgcagagcttcttaaacgttctacaagtctgctctccaaggcccacccaatgttcactcaagctcacagcatagctaaaggcttaagaaaagtacggcccatcacagcaccaggagggaattcctattagtgagttgccatggcaggagctatccagttatccaaggtagaaatggccccagacattccagcaggaggaagaagagcctaagccattcccacacttcacctgtatcacaactgacaaagcagtgacttctggatgaggagaatgtccactgccagcaatggacatgattccagggctcgaatccccgccccccaaggtttttcataattaccaacacttgaggctggaggtttcccaagcacccagaccagctgggctgcttcttccttctctcaacctctgtccattaccttttaacctgtgacctccagtcccagcccctggtaggccagttcacagggaggccatcatgccagctgtgatggggaagaccagagtcttatatcatgaattgcatcggtgctgtggggcaggcacataggatgccagggcaaagggagacggagctctgtgctgacaaggaatcacactgagcccagcttcagggggcccaggatagagtgcaagaggtgaagttcatggtaaaatccaggtctaaattcttgagatgtgccctcacttcttgtccccaggtagttttggactcagatgagtaacaggttctatgggggctcgggagcactttggggtgggaggaggaagatgcgtgcatgggaaagggcccgcgttgttatgtgagcacaaggatcagaagtccacagaggagaatgaacaggcaggcagggaagagaatgtgggcagcacttagacctggctttctgaggagagcttgcgttcgtgtttccagcctgtgtctggcagagagccccgtctctccggagtggctgcagtgtgaacactgctacactcagactgctcttcctgaagcagctgctctgtctccgtgtcatctagggagccagagctggcctggatggacactgtgtctgtcttcatgcatacgtgatcccgtagaaggccccccctggagctgcgcagttgcttgaggtcaccccattcagcgtcatccccagccaggaggcggattccctctacaatcttgatcttctccttggtgtagctgtggtcaggtccaccctctttcttatagcacagctgattatacacggctggcttgggagctgcttcaagtttcacttcctgagtggaagttcggtaggaggggttgctataggtcaggtttcccattccaggatccgtgaacttggattttctgtgtctgtatagcatcaaagccgcgatcaccaacaaaatcagcaggatactgaggagtccaccgatggcatagctgacgtgcagtccttcacctggagcagcagggacggcttcattggaatgtgcacagaggcccagctgggcatccctttcagagcatcttcctcctgccccctccagagaggtgcgggtcttggtggtagaagaatgtaaggtggtgggcagcgtgttgggtagcactgggctcttctcattcatgctggtagctctgggagcaggaggtacgaggccaggtacaagggagcagggatgaccgtcaggctcatcaggacacgcgcacacaaagtcagaggctcgggcaaagcagaggtgagtacagccaccattattcacaccgcaggcattggtccctgtctgccgctgaggggacaccacaataatatccataagtccctccacgttggccagtactgtctccttgttgcggcccgagtacttgtcgacacgttggatcgatttggtctgccagtccgtccagtagatccacctgtcctgctgtgtgagggcaaaggggtgggacacatggctgaccaagacctgcctcagcttcccattgaggtcagcactctcgatccgatccagatgtgcatctacccagtagatcctgcgggtatcatagtccaaggtgaggccgttgggccagcctaggtctgtgttgatgaggaccttcctctcagagccatccaggtttgcccgttcaatcttggcaatgtggccccagtctgtccagaagaggtacccctttctggggaaaacagcaatggcccggggctcgtctagactgttgttgattagcactttgcgacaggatccatctagccgagatgcttcgatggtatttcggccggtatctgtccagtacaggtttctggcaacccagtccactgccagcccgtcagtggtcttaagcccgtgtccaataacagtctccatgttgctgccattcaggtctgctcgcctgataacatccaggaacacatctgtgtaatagacctttccatgcacactgtcatagtctagggagatgacattgttgagcccaggaacaggaacgtgcacgtctgtgtggtcatcggtgtccagtgagatacggcgaatagagcctcggctagagaagagcaggtaggtttctggagaggggtcacaggtcttcctgtctcccttcagctgaatgccagtgggacaggcacaggagaaaccagaaggccgaggtaaacagaggtgggaacagccgccatttcttgagccacatttattaaaacccagtggctgtgcccggtcaacagcttggatgtccatgaggcctggcaggttggacctcacaaggatgacattgctgccagtactcttgtcggcccggtggatgctgcgggtctgccagtcagtccagtagatataggagtcaagcagagtgaggccatatgggtgctggactggtgacaccagtgtatgccgattagcgccattcaggtctgccacctcaattctctcagtatgggcatcagcccacagcagttgggaactggtcttgtccacagtcagtccattgggccaccctaggttgttgttgatgagcacagtacggtctgagccatccattccggaacgctctaatttggcgttctccccccagtctgtccagtacatgaaccccatttcatggtataatacaatggcccggggactgtcaaggttctgccacaccaacactttccgcatagacccatccaggttgccaacttcaatccgattcgttcctgtgtctgtccagtacactttccggccgatggcatccactgcaagcccgtctgtggtctgcagacctgtagtgatgatgtcctcatgctgtgagccatccaggctggcacggctgatcctgtgcagcgtgctgtcagaccagtacacttttccttccagcggatccactccaatggcgatggtgttcttcatggtcatgttgatgggtaccaccacatcagcaaaataagggatatccaaggagaccatgcgaacatcaatcctcctggcgaagatgaggaaactgttcatgcctggtgagcatgtcttgccatctcgtagcaggttgatacctgtggggcaggtgcagctgaagccgctcggatttggggacctgagacacaaatggctgcagccgccattctccacggcacacagcgtcgtcactggaggcctctggcggtggaagacatgaatgtccatgaggttctccaggttctcctgcagagtctcccggtctagcccagtcagccggtcagcactttgtatactcttggtctgccagtcagtccaatagatgcgctgtccatatagagtcagcccaaaagggtgggggagctggcttccaattagtaccttcctcttgctgccatccagcccagcaaattcaatagtcttcatgccggcatccgcccagtacagccgctgagagccgtagtcaatagccaatccattaggccaggtcaggttcgaagagatgatgacttgtcggctggaggcgtccatgccagcccgttcaatcttgggacttgcaccccagtcagtccaatacatgtacccgcccatgggctctaccactatgtcccgaggacggtcaaggttctcccagatgagcactgtcctcatgctgccatctgtgttggccacttcgatcctgtccgtgcctgcatctgtccagtagagcttgttggtgacccaatcaattgccaggccagcagggctctccaaactggtatccactaccacctcctgtcctgttccatcccacttggccctgctgatggtatcagtgctgacatctgtccaatacacgtggtcatcccgggagtcccagtcaagggccacagcactgcgcacgtcagccagtgggatgacatcgtcggacaggtcctctgtgtcgaagctgatccgacggatgtccatccttcgggcaaaaagcaggaacttgtcaagactctgggcacaggcgtggctgttgatcttgcggaagccggtggggcaggcacaggtgtagttctggccactgggtagacacaggtgagtgcaacctccattgttgtccccacagcggtttttccctgcgggctggcgctgggggtgcaaggtatgaatgtccataggaaagtggagcttgttgcgaatgatttcctggttcttccccgtaaacttgttggcactattgatgctcttggtgtgccagtctgtccaatacaagctgtcttcaaacactgtgatggcaaagggatgtgggaggccctggctaatgacagccttgcggtgactcccatctagattggccctctcgatgacgtggtgcttagcatccacccagtacatgcggcgaccagcgtagtcgatggtgaggccgttgggccagaaaagatgagtgtcagcaatgatgcgacgcccagagccgtccatgctggaggcctcaatgcggggggtgttgccccagtctgtccaataaatggttccctccatggggtgtagggcaatggctctgggcttctctaggctctgccatagcagcaccttccggtgggccccatccagattagccacctcaatcctcgacgtcccagagtcggtccagtagagcttgtcatggacccaatccaccgctaggccccctgggctctctagcccagtagacaccacctcctctacattgctgccattaaggttggcacggaggatgcggtccagggtgacatccgaccagaagaccagctcccgccggtgatgaaagtcgagggcaatggcgttctccaggttgttcagtagcagcgtgtactcggagcggtgcgggagcacctgccggatgtcgatacgattggcaaacagtagcacaggttctggccccagagctttgcagctgcgccgatcgggccgtagctcataccctgcttcacaccagcactggaaagccccttcagtgtttgtgcagccctggctgcagtacccctcctcagcacattcgtttacatcctggcacgttctcccatcctctgtgagccggtagcctgtgtggcaggtacactgcactgcccctcgcaccatctgacacttctgggcacagccaccgttgttaacattgcagttctcctcacccgtccggggccgacagttctgctgtggactttcgtcactgctgtcaccgcagtcgttgatcccgttgcacagcttcctctgcccaatacagcgcccgttccaacacaggaactggtcagaggcgcactgggggcttcctgtgttctcacagttttcttcatcgctgttgtccgcacagtcatcctccccatcacagcgccaggacagacggacgcaacggcctgaccgacagcgaaactgttcggctgtgcacatggaggtggtgcagttgcgttcatcagactggtcatcacagtctgcatcaccatcacagcgccagcccgagttgatgcacaggccactgtcacacatgaattccccagagcggcagggctggtgggaggagcagtcagactcgtctgaccagtctccacagtcgtcatctccgtcacagtggtagatgtcgaggatgcagcggccataggcgcactggaactcttccaggttgcaaggaggagagggtactgctgaagggcagctttcctcatcagagccatctttgcagtctgtgtcaccatcgcagtaccaatgctcagcaatgcagctgccgtcgctgcagcggaattccttgtctgagcacttgcgcatgtcgcattgctcgtcactgttgtcaccacagtcgttgtccccatcacagtgccacagactccgaatgcagtagccgttctggcaggggaattcgtcctcctcacactcccgggggggacagtcctgctcatcagagtcatcttcacagtcattgtccccgtcacacacccaggagcgtcggatgcacttgccgttgtcacagtggaagtccagaggggagcaggtaggcagcgtacagccatcctcatcgctgtggtctccacagtcattgtctccatcacactgccactgggcggggatacaggtacattcgccaagcgcgctcaccgcacatgtgaagtggctccgaccacatgcacactccagactgctggctattccgtgtgcgcagagcagggcgccaagcagcagcgcgccccaccaccgcctcatggtgctgcggccgccgccggcgttccctgccggcccgggggtcccgcgggctcccaagggacgccggggcggagagaatcagcggagggttcccccgggttgaaaagcgtcccgggtccagctcggccggcgcgccctgcaagtcgccctccgggctgctgctgcctcct

SEQ ID NO: 305 - RNA, 7784 nt, Rattus norvegicus
  source 1..7784: mol_type = mRNA
cggccgcagcaccatgaggcggtggtggggcgcgctgctgctcggcgccctgctctgcgcacacggcacagccagcaatctggagtgtgcgtgtggtcggagccacttcacatgtgcagtgagcgcgctcggcgaatgtacctgcatccccgcccagtggcagtgtgatggtgacaatgactgtggagaccacagcgatgaggatggctgtacgctgcctacctgttcccctctggacttccactgtgacaacggcaagtgcatccgacgctcctgggtgtgtgatggggacaatgactgtgaagatgactccgatgagcaggactgtcccccccgggagtgtgaggaggacgagttcccctgccagaacggctactgcatccggagtctgtggcactgtgatggggacaatgactgtggtgacaacagtgacgaacagtgcgacatgcgcaagtgctcagacaaggaattccgctgcagtgatgggagctgcattgctgagcattggtactgtgatggagacacagactgcaaagacggctctgatgaggaaagctgcccctcagcagtaccctctcctccttgcaacctggaagagttccagtgtgcctacggccgccgcatccttgacatctaccactgtgacggggatgatgactgcggagactggtcagacgagtccgactgctcctcccaccagccctgccgctctggggaattcatgtgtgacagtggcctgtgcgtcaacgcaggctggcgctgtgatggtgatgcggactgcgatgaccagtctgatgaacgtaactgcaccacctccatgtgcacagctgaacagtttcgctgtcggtcaggccgctgtgtccgtctgtcctggcgctgtgatggggaggatgactgcgcggacaacagtgatgaagaaaactgtgagaacacaggaagcccccaatgcgcctctgaccagttcctgtgttggaatgggcgttgtattgggcagaggaagctctgcaatggggtcaatgactgcggcgacaacagtgacgaaagcccacagcagaactgtcggccccggacgggtgaggagaactgcaatgttaacaacggtggctgtgcccagaagtgtcagatgattcgaggggcagtgcagtgtacctgccacacaggctaccggctcacagaggatgggagaacgtgccaggatgtgaatgaatgtgctgaggagggatactgcagccagggctgcacaaacagcgaaggggctttccagtgctggtgcgaagccggttatgagctgcggcccgatcggcgcagctgcaaggctctggggccggaacctgtgctactgtttgccaatcgcatcgacatccggcaggtgctcccgcaccgctccgaatacacgctgctactgaacaacctggagaacgccattgcccttgactttcatcatcggcgggagctggtcttctggtctgatgtcaccctggaccgcatcctccgtgccaaccttaatggcagcaatgtggaggaggtggtgtctactgggctagagagcccaggcggcttggctgtggattgggtccatgacaagctctactggactgactccgggacgtcgaggattgaggtggctaatctggacggggcccaccggaaggtgctgctgtggcagagcctggagaagcccagggccattgccctgcaccccatggagggaaccatctattggacagactggggcaacaccccccgcatcgaggcctccagcatggacggctctggacgtcgcatcattgctgacactcatcttttctggcccaacggcctcaccatcgactacgctggacgccgtatgtactgggtggacgctaagcaccacgtcatcgagagagccaatctagatgggagtcaccgcaaggctgtcattagccagggcctcccacatccctttgccatcacagtgtttgaagacagcttgtattggacagactggcacaccaagagcatcaatagtgccaacaagttcactgggaagaaccaggagatcattcgcaacaagctccactttcctatggacattcataccttgcacccccagcgccagcctgcagggaaaaaccgctgcggggacaacaacggaggttgcactcacctgtgtctacccagtggccagaactacacttgtgcctgccccaccggcttccgaaaaatcaacagccacgcctgtgcccagagtcttgacaagttcctgctttttgcccgaaggatggacatccgtcggatcagcttcgacacagaggacctgtccgacgatgtcatcccactggctgacgtgcgcagtgctgtggcccttgactgggactcccgggatgaccacgtgtactggacagatgtcagcactgataccatcagcagggccaagtgggatggaacaggacagaaggtggtagttgacaccagtttggagagccctgctggcctggcaattgattgggtcaccaacaaactctactggacagatgcaggtacagaccggattgaagtggccaacacggacggcagcatgaggacagtgctcatctgggagaaccttgatcgtcctcgggacatcgtggtagaacccatgggcgggtacatgtattggactgactggggtgcaagtcccaagattgaacgagctggcatggatgcctccaaccgacaagtcatcatctcttcgaatctgacatggcctaatggattagctattgactatgggtcccagcggctgtactgggctgatgccggcatgaagactattgaatttgctgggctggatggcagcaagaggaaggtactaattggaagtcaactcccccaccctttcgggctgactctatacggacagcgcatctattggactgactggcagaccaaaagtatccaaagtgctgaccggctgactgggctagaccgggagactctgcaggagaacctggagaatcttatggacatccatgtcttccaccgccagaggcctccagtgacgacaccatgtgctgtggagaatggcggctgcagccatttgtgtcttcggtccccaagtccgagcggcttcagctgtacctgccccacaggtatcaacctgctgcttgatggcaagacatgctcaccaggcatgaacagtttcctcatcttcgccaggaggattgatgttcgcatggtctccttggacatcccttattttgctgatgtggtggtacccatcaacatgaccatgaagaacaccattgccattggagtggacccgctggaaggaaaagtgtactggtctgacagcacactgcacaggatcagccgtgccagcctggatggctcacagcacgaggacatcatcactacaggtttgcagaccacagatggacttgcagtggatgccatcggccggaaagtgtattggacagacacgggaacgaatcggattgaagttggcaacctggatgggtctatgcggaaagtgttggtgtggcagaaccttgacagtccccgggccattgtgctataccatgaaatggggttcatgtactggacagactggggggagaatgccaaactagagcgttccgggatggatggctcagaccgtactgtgctcatcaacaacaacctagggtggcctaacggactgactgtggacaagaccagctcccaactgctgtgggctgatgcccatactgagagaattgaggtggctgacctgaacggtgccaatcggcatacattggtgtcaccagtgcagcacccatatggcctcactctgcttgactcttacatctactggactgactggcagacccgtagcatccaccgggccgacaagagtactggcagcaatgttatcctcgtgaggtccaacctgccaggcctcatggacatccaagctgttgaccgggcacagccactgggttttaataagtgtggttcgagaaatggcggctgctcccacctctgtttacctcggccctctggtttctcctgtgcctgccccactggcattcagctgaagggggatgggaagacctgtgacccctctccggagacctacctgctcttctctagccggggctccattcgccgtatctcactggacaccgatgaccacacagacgtgcatgtccctgttcctgggctcaacaatgtcatctccctagactatgacagtgtggatggaaaggtctattacacagacgtgttcctggatgttatcaggcgagcagacctgaatggcagcaacatggagactgttattgggcatgggctgaagaccactgatgggctggcagtggactgggttgccagaaacctgtactggacagatacaggccgaaataccatcgaagcatctcggctagatggttcctgtcgcaaagtgctaatcaacaacagtctggacgagccccgggccattgctgttttccccagaaaggggtacctcttctggacagactggggccacattgccaagattgaacgggcaaacctggatggttctgagaggaaggtcctcatcaatgcagacctaggctggcccaatggccttaccttggactatgatacccgcaggatctactgggtagatgcacatctggatcggattgagagtgctgacctcaatgggaagctgaggcaggtcttggtcagccatgtgtcccacccctttgccctcacacagcaggacaggtggatctactggacagactggcagaccaaatccatccagcgtgtcgacaagtactcaggccgcaacaaggagacagtgctggccaatgtggagggactcatggatatcatcgtggtgtcccctcaacggcagacagggaccaatgcctgtggtgtgaacaatggtggctgtagccacctctgctttgccagagcctctgactttgtgtgcgcctgtcctgatgagccagacagtcatccctgctccctcgtgcctggcctcatgcctcctgctcccagagctaccagcctgaatgaaaagagcccagtgctccccaacacattgcccaccaccttacattcttctaccaccaggacccgcacatctccagagggggcagaaggaagatgctctgaaagggacgcccagctgggcctctgtgcacattccaatgaagctgtacctgctgctccaggtgaaggactgcatgtcagctacgccgttggtggactcctcagcgtcctgctgattttgttggtgactgcagctttgatgctatacagacacagaaaatccaaattcacggatcctggaatgggaaacctgacctacagcaacccctcctaccgaacttccactcaggaagtgaaaattgaagcagctcccaaaccagccatgtataatcagctgtgctataagaaagagggtggacctgaccacagctacaccaaggagaagatcaagattgtagagggaattcacctcctggctgggcatgatgctgaatggggtgacctcaagcaactgcgcagctccagggggggccttctacgggatcacgtatgcatgaagacagacacggtgtccatccaggccagctctggctccctagatgacacggagacagagcagctgctgcaggaagagcagtctgagtgtagcagtgttcacactgcaaccactccagagagacggggctctctgccagacacaggctggaaacatgaacgcaagctctcctcagaaagccaggtctaagtgcccacattctcttccctgcctgcctgttcgttcttctctgtggacttctgatccttgtgctcacaaagcaacgggccctttcccgtgcactcatcttcctcctcccacccaaaagtgttcccacgaccccatagaacctgttactcacctgagtctgaaactacctggggacaagaagtgagggcacatctcaagaatttagacctggattttaccatgaacttcacctcttgcactctatcctgggccccctgaagctgggctcagtgtaataccttgtcagcacagcatcttcctttgccctggcatcctatgtgtctgccccacggcaccgatgcaattggtgatgtaagactttggtcttccccatcacagctgacatgatggcctctctgtgaactggcctaccaggggctgggactggaggtcacaggtaaaaggtaatgaatggatagaggttgagagaaggaagaaccagcccagctggtctgggtgtttgggaaacctccagcctcaagtgttggtaattatgaaaaacctttgggggaaggcacttgagccctgggatctcgtccattgctggcagtggacgttctcacccaggtgaagtgtgggtatggcctaagttcttcttcctcctgctggaatgtctggggccactatctaccttcagtaactggaggcctctgtcatggcaactcactaataggaattccctcctggtgctgctactggccagtacttttcttaagcctttaactatgctgtgagcttgagtgaacattggtcgggccttggagagtaggcctctagaacgtttaagaagctctgcaaagatcaagaacagtatcttacctgagcctcactactctgcccttttttctcccattctctgggattctaagggaagcaattctatcacagcctttcaaagaatggctagacattttcctaaatggtcaggaagagcaactagagagacacaagacacccaggggctcaggagaagtatcgtgaggttgaacttcttgagttcattctcaggtgctcagggacccaagcctggggcactaaggtcatgtgccaactcttctcggcctctgcccacactaaagtgccaccattagctgcatgcttctttaggccaagggcttctctcaggggagctgagagtctttttgtgctgccctagaatttcatcctagtgtttcacttctgagagaggggaatctagacttgttttctctaaccgatcctgtatcaccttggtctccattgtccagtgatgagtgaggaggttcaatgaagatgcaaagtggtgagcagggagtggagaggtggtgagattaggtccagagcaagtctaggcacttctccatagaaactgaagcacaggagagattgacaggagctgaacatggaggggagggtttttaggggaagttttctgacttaaaacatctttcatggttattgctacacagagatcagcagccaggcatatgcatgaaaaacaggacaagatcaaatcttttctggtcagttattaggagtaggagacagatgtcaaaccattagtctcgttgtcactagctaggcccagacctatgtctacacatagagaaccaaggcaggccaaaggccttttccagtacaccaactgagaaaagaacagtgccatttttaagaggaaagacagacatttcacacagaatgaggcaacatttgagcctttaaacccgtagctggggaggaggaagaaaacaggagtgtggtgtcctcctgagtggaaagggcaaggttcttattgcactcgggctgttcagaatgtagaaaggacgcatttgagggaatatctatttgagcactgatttactctgtaaagagggcaaaatctctctgtcctaaactaatggaagtgattttcccatgctcatgtgtaatgattttaacattactcactggagagattggactttctggagttatttaaccactatgttcagtattttagggctttatgataatttaatataaatttagctttctt

SEQ ID NO: 306 - RNA, 7784 nt, Rattus norvegicus
  source 1..7784: mol_type = mRNA
aagaaagctaaatttatattaaattatcataaagccctaaaatactgaacatagtggttaaataactccagaaagtccaatctctccagtgagtaatgttaaaatcattacacatgagcatgggaaaatcacttccattagtttaggacagagagattttgccctctttacagagtaaatcagtgctcaaatagatattccctcaaatgcgtcctttctacattctgaacagcccgagtgcaataagaaccttgccctttccactcaggaggacaccacactcctgttttcttcctcctccccagctacgggtttaaaggctcaaatgttgcctcattctgtgtgaaatgtctgtctttcctcttaaaaatggcactgttcttttctcagttggtgtactggaaaaggcctttggcctgccttggttctctatgtgtagacataggtctgggcctagctagtgacaacgagactaatggtttgacatctgtctcctactcctaataactgaccagaaaagatttgatcttgtcctgtttttcatgcatatgcctggctgctgatctctgtgtagcaataaccatgaaagatgttttaagtcagaaaacttcccctaaaaaccctcccctccatgttcagctcctgtcaatctctcctgtgcttcagtttctatggagaagtgcctagacttgctctggacctaatctcaccacctctccactccctgctcaccactttgcatcttcattgaacctcctcactcatcactggacaatggagaccaaggtgatacaggatcggttagagaaaacaagtctagattcccctctctcagaagtgaaacactaggatgaaattctagggcagcacaaaaagactctcagctcccctgagagaagcccttggcctaaagaagcatgcagctaatggtggcactttagtgtgggcagaggccgagaagagttggcacatgaccttagtgccccaggcttgggtccctgagcacctgagaatgaactcaagaagttcaacctcacgatacttctcctgagcccctgggtgtcttgtgtctctctagttgctcttcctgaccatttaggaaaatgtctagccattctttgaaaggctgtgatagaattgcttcccttagaatcccagagaatgggagaaaaaagggcagagtagtgaggctcaggtaagatactgttcttgatctttgcagagcttcttaaacgttctagaggcctactctccaaggcccgaccaatgttcactcaagctcacagcatagttaaaggcttaagaaaagtactggccagtagcagcaccaggagggaattcctattagtgagttgccatgacagaggcctccagttactgaaggtagatagtggccccagacattccagcaggaggaagaagaacttaggccatacccacacttcacctgggtgagaacgtccactgccagcaatggacgagatcccagggctcaagtgccttcccccaaaggtttttcataattaccaacacttgaggctggaggtttcccaaacacccagaccagctgggctggttcttccttctctcaacctctatccattcattaccttttacctgtgacctccagtcccagcccctggtaggccagttcacagagaggccatcatgtcagctgtgatggggaagaccaaagtcttacatcaccaattgcatcggtgccgtggggcagacacataggatgccagggcaaaggaagatgctgtgctgacaaggtattacactgagcccagcttcagggggcccaggatagagtgcaagaggtgaagttcatggtaaaatccaggtctaaattcttgagatgtgccctcacttcttgtccccaggtagtttcagactcaggtgagtaacaggttctatggggtcgtgggaacacttttgggtgggaggaggaagatgagtgcacgggaaagggcccgttgctttgtgagcacaaggatcagaagtccacagagaagaacgaacaggcaggcagggaagagaatgtgggcacttagacctggctttctgaggagagcttgcgttcatgtttccagcctgtgtctggcagagagccccgtctctctggagtggttgcagtgtgaacactgctacactcagactgctcttcctgcagcagctgctctgtctccgtgtcatctagggagccagagctggcctggatggacaccgtgtctgtcttcatgcatacgtgatcccgtagaaggccccccctggagctgcgcagttgcttgaggtcaccccattcagcatcatgcccagccaggaggtgaattccctctacaatcttgatcttctccttggtgtagctgtggtcaggtccaccctctttcttatagcacagctgattatacatggctggtttgggagctgcttcaattttcacttcctgagtggaagttcggtaggaggggttgctgtaggtcaggtttcccattccaggatccgtgaatttggattttctgtgtctgtatagcatcaaagctgcagtcaccaacaaaatcagcaggacgctgaggagtccaccaacggcgtagctgacatgcagtccttcacctggagcagcaggtacagcttcattggaatgtgcacagaggcccagctgggcgtccctttcagagcatcttccttctgccccctctggagatgtgcgggtcctggtggtagaagaatgtaaggtggtgggcaatgtgttggggagcactgggctcttttcattcaggctggtagctctgggagcaggaggcatgaggccaggcacgagggagcagggatgactgtctggctcatcaggacaggcgcacacaaagtcagaggctctggcaaagcagaggtggctacagccaccattgttcacaccacaggcattggtccctgtctgccgttgaggggacaccacgatgatatccatgagtccctccacattggccagcactgtctccttgttgcggcctgagtacttgtcgacacgctggatggatttggtctgccagtctgtccagtagatccacctgtcctgctgtgtgagggcaaaggggtgggacacatggctgaccaagacctgcctcagcttcccattgaggtcagcactctcaatccgatccagatgtgcatctacccagtagatcctgcgggtatcatagtccaaggtaaggccattgggccagcctaggtctgcattgatgaggaccttcctctcagaaccatccaggtttgcccgttcaatcttggcaatgtggccccagtctgtccagaagaggtacccctttctggggaaaacagcaatggcccggggctcgtccagactgttgttgattagcactttgcgacaggaaccatctagccgagatgcttcgatggtatttcggcctgtatctgtccagtacaggtttctggcaacccagtccactgccagcccatcagtggtcttcagcccatgcccaataacagtctccatgttgctgccattcaggtctgctcgcctgataacatccaggaacacgtctgtgtaatagacctttccatccacactgtcatagtctagggagatgacattgttgagcccaggaacagggacatgcacgtctgtgtggtcatcggtgtccagtgagatacggcgaatggagccccggctagagaagagcaggtaggtctccggagaggggtcacaggtcttcccatcccccttcagctgaatgccagtggggcaggcacaggagaaaccagagggccgaggtaaacagaggtgggagcagccgccatttctcgaaccacacttattaaaacccagtggctgtgcccggtcaacagcttggatgtccatgaggcctggcaggttggacctcacgaggataacattgctgccagtactcttgtcggcccggtggatgctacgggtctgccagtcagtccagtagatgtaagagtcaagcagagtgaggccatatgggtgctgcactggtgacaccaatgtatgccgattggcaccgttcaggtcagccacctcaattctctcagtatgggcatcagcccacagcagttgggagctggtcttgtccacagtcagtccgttaggccaccctaggttgttgttgatgagcacagtacggtctgagccatccatcccggaacgctctagtttggcattctccccccagtctgtccagtacatgaaccccatttcatggtatagcacaatggcccggggactgtcaaggttctgccacaccaacactttccgcatagacccatccaggttgccaacttcaatccgattcgttcccgtgtctgtccaatacactttccggccgatggcatccactgcaagtccatctgtggtctgcaaacctgtagtgatgatgtcctcgtgctgtgagccatccaggctggcacggctgatcctgtgcagtgtgctgtcagaccagtacacttttccttccagcgggtccactccaatggcaatggtgttcttcatggtcatgttgatgggtaccaccacatcagcaaaataagggatgtccaaggagaccatgcgaacatcaatcctcctggcgaagatgaggaaactgttcatgcctggtgagcatgtcttgccatcaagcagcaggttgatacctgtggggcaggtacagctgaagccgctcggacttggggaccgaagacacaaatggctgcagccgccattctccacagcacatggtgtcgtcactggaggcctctggcggtggaagacatggatgtccataagattctccaggttctcctgcagagtctcccggtctagcccagtcagccggtcagcactttggatacttttggtctgccagtcagtccaatagatgcgctgtccgtatagagtcagcccgaaagggtgggggagttgacttccaattagtaccttcctcttgctgccatccagcccagcaaattcaatagtcttcatgccggcatcagcccagtacagccgctgggacccatagtcaatagctaatccattaggccatgtcagattcgaagagatgatgacttgtcggttggaggcatccatgccagctcgttcaatcttgggacttgcaccccagtcagtccaatacatgtacccgcccatgggttctaccacgatgtcccgaggacgatcaaggttctcccagatgagcactgtcctcatgctgccgtccgtgttggccacttcaatccggtctgtacctgcatctgtccagtagagtttgttggtgacccaatcaattgccaggccagcagggctctccaaactggtgtcaactaccaccttctgtcctgttccatcccacttggccctgctgatggtatcagtgctgacatctgtccagtacacgtggtcatcccgggagtcccagtcaagggccacagcactgcgcacgtcagccagtgggatgacatcgtcggacaggtcctctgtgtcgaagctgatccgacggatgtccatccttcgggcaaaaagcaggaacttgtcaagactctgggcacaggcgtggctgttgatttttcggaagccggtggggcaggcacaagtgtagttctggccactgggtagacacaggtgagtgcaacctccgttgttgtccccgcagcggtttttccctgcaggctggcgctgggggtgcaaggtatgaatgtccataggaaagtggagcttgttgcgaatgatctcctggttcttcccagtgaacttgttggcactattgatgctcttggtgtgccagtctgtccaatacaagctgtcttcaaacactgtgatggcaaagggatgtgggaggccctggctaatgacagccttgcggtgactcccatctagattggctctctcgatgacgtggtgcttagcgtccacccagtacatacggcgtccagcgtagtcgatggtgaggccgttgggccagaaaagatgagtgtcagcaatgatgcgacgtccagagccgtccatgctggaggcctcgatgcggggggtgttgccccagtctgtccaatagatggttccctccatggggtgcagggcaatggccctgggcttctccaggctctgccacagcagcaccttccggtgggccccgtccagattagccacctcaatcctcgacgtcccggagtcagtccagtagagcttgtcatggacccaatccacagccaagccgcctgggctctctagcccagtagacaccacctcctccacattgctgccattaaggttggcacggaggatgcggtccagggtgacatcagaccagaagaccagctcccgccgatgatgaaagtcaagggcaatggcgttctccaggttgttcagtagcagcgtgtattcggagcggtgcgggagcacctgccggatgtcgatgcgattggcaaacagtagcacaggttccggccccagagccttgcagctgcgccgatcgggccgcagctcataaccggcttcgcaccagcactggaaagccccttcgctgtttgtgcagccctggctgcagtatccctcctcagcacattcattcacatcctggcacgttctcccatcctctgtgagccggtagcctgtgtggcaggtacactgcactgcccctcgaatcatctgacacttctgggcacagccaccgttgttaacattgcagttctcctcacccgtccggggccgacagttctgctgtgggctttcgtcactgttgtcgccgcagtcattgaccccattgcagagcttcctctgcccaatacaacgcccattccaacacaggaactggtcagaggcgcattgggggcttcctgtgttctcacagttttcttcatcactgttgtccgcgcagtcatcctccccatcacagcgccaggacagacggacacagcggcctgaccgacagcgaaactgttcagctgtgcacatggaggtggtgcagttacgttcatcagactggtcatcgcagtccgcatcaccatcacagcgccagcctgcgttgacgcacaggccactgtcacacatgaattccccagagcggcagggctggtgggaggagcagtcggactcgtctgaccagtctccgcagtcatcatccccgtcacagtggtagatgtcaaggatgcggcggccgtaggcacactggaactcttccaggttgcaaggaggagagggtactgctgaggggcagctttcctcatcagagccgtctttgcagtctgtgtctccatcacagtaccaatgctcagcaatgcagctcccatcactgcagcggaattccttgtctgagcacttgcgcatgtcgcactgttcgtcactgttgtcaccacagtcattgtccccatcacagtgccacagactccggatgcagtagccgttctggcaggggaactcgtcctcctcacactcccgggggggacagtcctgctcatcggagtcatcttcacagtcattgtccccatcacacacccaggagcgtcggatgcacttgccgttgtcacagtggaagtccagaggggaacaggtaggcagcgtacagccatcctcatcgctgtggtctccacagtcattgtcaccatcacactgccactgggcggggatgcaggtacattcgccgagcgcgctcactgcacatgtgaagtggctccgaccacacgcacactccagattgctggctgtgccgtgtgcgcagagcagggcgccgagcagcagcgcgccccaccaccgcctcatggtgctgcggccg

SEQ ID NO: 307 - RNA, 8055 nt, Macaca fascicularis
  source 1..8055: mol_type = mRNA
gtcccctggcggggcagcgtcggctctggcagcactggaggaggcggcggcgtccggagggcgacttgcggggcgcgcaggccgccgtgcacccgggacgcttccccctcggggaccctccgcgggcttcgccaccgcgccgtcccgcgggagtcggcaggaccccgggcgggcggcgcgggcggcaccatgaggcggcagtggggcgcgctgctgcttggcgccctgctctgcgcacacggcctggccagcagccccgagtgtgcttgtggtcggagccacttcacatgtgcagtgagtgctcttggcgagtgtacctgcatccctgcccagtggcagtgtgatggagacaacgactgcggggaccacagcgatgaggacggatgtatgctacctacctgttcccctctcgactttcactgtgacaatggcaagtgcatccgccgctcctgggtgtgtgacggggacaacgactgtgaggatgactcggatgagcaggactgtcccccccgggagtgtgaggaggacgagtttccctgccagaacggctactgcatccggagtctgtggcactgcgatggtgacaatgactgtggtgacaacagcgatgagcagtgtgacatgcgcaagtgctccgacaaggagttccgctgcagtgacggaagctgcattgctgagcactggtactgcgacggtgacaccgactgcaaagatggctccgatgaggagagctgtccctcagcagtgccagcacccccctgcaacctggaggagttccagtgtgcctatggccgctgtatcctcgatatctaccactgcgatggcgacgatgactgcggagactggtcggacgagtctgactgctcctcccaccagccctgccgctctggggagttcatgtgtgacagcggcctgtgcatcaatgcaggctggcgctgcgatggtgacgcggactgtgatgaccagtctgatgagcgcaactgcaccacctccatgtgtacagcagaacagttccgctgtcgctcaggccgctgcgtccgcctgtcctggcgctgtgatggggaggacgactgtgcggacaatagcgatgaagagaactgtgagaatacaggaagcccccagtgtgcctcggaccagttcctgtgttggaatgggcgctgcattgggcagaggaagctgtgcaatggggtcaacgactgtggtgacaacagcgacgaaagcccacagcagaattgccggccccggacaggtgaggagaactgcaatgttaacaacggtggctgtgcccagaagtgccagatggtgcgaggggcagtgcagtgtacctgccacacaggctaccggctcacagaggatgggcacacgtgccaagatgtgaatgagtgtgccgacgaggggtattgcagccagggttgcaccaacagcgaaggggctttccagtgctggtgcgaaacaggctatgaactacggcccgaccggcgcagctgcaaggctctggggccagagcctgtgctgctgttcgccaatcgcatcgacatccggcaggtgctgccgcaccgctctgagtacacgctgctgcttaacaacctggagaacgccattgcccttgatttccaccaccgccgcgagcttgtcttctggtcagacgtcaccctggaccggatcctccgtgccaacctcaacggcagcaacgtggaggaggttgtgtctactgggctggagagcccagggggcctggctgtggattgggtccatgacaaactctactggaccgactcaggcacctcaaggattgaggtggccaatctggacggggcccaccggaaggtgctgctgtggcagaacctggagaagccccgggccattgccttgcatcccatggagggtaccatttactggacagactggggcaacaccccccgtattgaggcctccagcatggatggctctgggcgccgcatcattgctgatacccatctcttctggcccaatggcctcaccatcgactatgctgggcgccgtatgtactgggtggatgctaagcaccatgtcattgagagggccaatctggatgggagtcaccgtaaggctgtcattagccagggccttccgcatcccttcgccatcacagtgtttgaagacagcctgtactggacagactggcacaccaagagcatcaatagcgctaacaaatttacggggaagaaccaggaaatcattcgcaacaaactccacttccctatggacatccacaccttgcacccgcagcgccaacctgcagggaagaaccgctgtggggacaacaacggaggctgcacgcacctgtgtctgcccagtggccagaactacacctgtgcctgccccactggcttccgcaagatcagcagccacgcctgtgcccagagtcttgacaagttcctgctttttgcccgaaggatggacatccgtcgaatcagctttgacacagaggacctgtctgatgatgtcatcccactggctgacgtacgcagtgctgtggcccttgactgggactcccgggatgaccacgtgtactggacagatgtcagcactgataccatcagcagggccaagtgggatggaacaggacaggaggtggtagtggataccagtttggagagcccagctggcctggccattgattgggtcaccaacaaactgtactggacagatgcaggtacagaccggattgaagtagccaacacagatggcagcatgagaacagtactcatctgggagaaccttgatcgtcctcgggacatcgtggtggaacccatgggcgggtacatgtattggactgactggggtgcgagccccaagattgaacgagctggcatggatgcctcaggccgccaagtcattatctcttctaatctgacctggcctaacgggctagctattgattacggttcccagcggctatactgggctgacgccggcatgaagacaattgaatttgctggactggatggcagtaagaggaaggtactgatcggaagccagctcccccacccatttgggctgaccctctatggagagcgcatctattggactgactggcagactaagagtatacagagcgctgaccggctgacagggctggaccgggagactctgcaggagaacctggagaacctgatggacatccatgtcttccaccgccgccggcccccagtgtctacaccatgtgctatggagaatggcggctgtagccacctgtgtcttaggtccccaaatccaagcggcttcagctgtacctgccccacaggcatcaacctgctgcctgatggcaagacttgctcaccaggcatgaacagtttcctcatcttcgccaggaggatagacattcgcatggtctccctggacatcccttattttgctgatgtggtggtaccaatcaacattaccatgaagaacaccattgccattggagtagacccccaggaaggaaaagtgtactggtctgacagcacactgcacaggatcagccgtgccaatctggacggttcacagcacgaggacatcatcaccacagggctacagaccacagatgggctcgcggtggatgccattggccggaaagtgtactggacagacacgggaacaaaccggattgaagtgggcaacctggacgggtccatgcggaaagtgttggtgtggcagaaccttgacagtccccgggcaatcgtactgtaccatgagatggggtttatgtactggacagactggggggagaatgccaagttagagcggtctggaatggatggctcagaccgcacagtgctcatcagcaacaacctaggatggcccaatggactgactgtggacaaggccagctcccaactgctgtgggccgatgcccacaccgagcgaattgaggctgctgacctgaatggtgccaatcggcatacgttggtgtcaccagtgcagcacccatatggcctcaccctcctcgactcctatatatactggactgactggcagacccggagcatccaccgtgccgacaagggtaccggcagcaatgttatcctcgtgaggtccaacctgccaggcctcatggacatccaggctgtggaccgagcacagccactaggttttaacaagtgtggctccagaaatggcggctgctcccacctctgcttgcctcggccttctggcttctcctgtgcctgccccactggcatccagctgaagggagatgggaagacctgtgatccctctcctgagacctacctgctcttctccagccgtggctccatccggcgtatctcactggacaccagtgaccacaccgatgtgcacgtccctgttcctgagctcaacaatgtcatctccctggactatgacagcgtggatggaaaggtctattacacagatgtgttcctggatgttatcaggcgagcagacctgaatggcagcaacatggagacagtgatcgggcgtgggctgaagaccactgatgggctggcagtggactgggtggccaggaacctgtactggacagacacaggtcgaaataccattgaggcatccaggctggatggttcctgccgcaaagtgctgatcaacaatagcctggatgagccccgggccattgctgttttccccaggaaggggtacctcttctggacagactggggccacattgccaagatcgaacgggcgaacctggacggttctgagcggaaggtcctcatcaacacagacctgggctggcccaacggcctcaccctggactatgatacccgcaggatctactgggtagacgcccatctggaccggatcgagagtgctgacctcaacgggaaactgcggcaggtcttggtcagccatgtgtcccacccctttgccctcacacagcaagacaggtggatctactggacagactggcagaccaagtcaatccagcgtgttgacaaatactcaggccggaacaaggagacagtgctggcaaatgtggaaggactcatggatatcatcgtggtttcccctcagcggcagacagggaccaatgcctgtggcgtgaacaatggtggctgcacccacctctgctttgccagagcctcggacttcgtatgtgcctgtcctgacgaacgtgatagccggccctgctctcttgtgcctggcctggtaccaccagctcctaggtccactggcatgagtgaaaagagcccggtgctacccaacacactacctaccaccttgcgttcttcaaccacccggacccgcatgtctctggaggaggtggaaggaagatgctccgaaagggatgccaggctgggcctctgtgcacgttccaatgaggccgttcctgctgctccaggggaaggacttcatatcagctacgccattggtggactcctcagtattctgctgattttggtggtgattgcagctttgatgctgtacagacacaaaaaatccaagttcactgatcctggaatggggaacctcacctatagcaacccctcctaccgaacatccacacaggaagtgaagattgaagcaatccccaaaccagccatgtacaaccagctgtgctataagaaagagggagggcctgaccataactacaccaaggagaagatcaagatcgtagagggaatctgcctcctgtctggggatgatgctgagtgggatgacctcaagcaactgcgaagctcacgggggggcctcctccgggatcatgtatgcatgaagacagacacagtgtctatccaggccagctctggctccctggatgacacagagacggagcagctgttacaggaagagcagtccgagtgtagcagcgtccatactgcagccactccagaaagacgaggttctctgccagacacgggctggaaacatgaacgcaagctctcctcagagagccaggtctaaatgcccgcgttctcttccctgcctgcctgttccttctcctttatggacgtctagtccttgtgcttgcttacaccgcaggcccctcttctgtgtgctcgtcctcctcctcctcccaccccataactgctcctaagccctcactggagctgtttaccacctgagtccataactacctgtgcacaacaaatgatggtgcatctcgagaatttagacctggattttaccatgaacctcacatcttgtactccgtcctgggccccctgaaactgcttattcatgattcctcgccagcgtagagctccacctccccttcccccggtaccctcagtgcctgcttctcagtgctgatgcagctgatgacccaggactgtgctctgccccatcacagccagcatgactgcttctctgagagaacttgcccatcagaggctgggacaagggggtgtgggtaaagaggaatgaaggatagaggctgagagaagaaggaaaagtcagcccagcaggtatgggcatctgggaaccttcagcctcaagtgtgttggtaacatgaaaaagctttggggggtagttgggtctgggtgtctggtccattgctggcagtggacattattcttgccctaagagtcactgccttttcagcagcagatactggtgagatgggggtggctcaagctgttcttcctcctgctagaatgtgtggagctctttctaccttcggataactgggttccctatcacgaggctactggctaatatgaattccctcctggtgccaccactggccagtatctttcctaagtctttgatcagagtaaccaggttgtgagccagtggcttgaattaatgttaggccttgggggctgagtctctgaaaagtctaagaagctctgcctagaccaaacatggtataccacctgaaccctctcgccctcattccctgggattctagggaagagacctagaaacaagctttcaaagaaacccggaagttgtcataaatggtcagaaagaacaatcaggttggagacttgggacacccagggcctaaagagaagtatccatgagggtcaaacttcctgttgaacttcctgtgttctttctcaagtgctcagggatctaaattagtggacagcgagcctgtggctgtggggtggtgacgttcctcttccagctgtctcctcagctaaggggcttggtttccgtgtgggatgccatcacttggttcatgctcattcacacaaagggcatgtgtctcagcctagtatgagggaaactgagacttatttttgccctaaaacgtctccctagttgttcttcgtgggttggtttatttttttgttttttttttccgtttgttttttgcctaatttgctttttctgaccaagccttgtggcaccagcaatctccaaagtcctgtggtgggagggccgaataaataaagatgcaaagaggtgggcaaggagtaggaaggtagagagcaccactgatgaggccctcctagcccatggcagacccagacctcttctcccccaggaattagaagtggcaggagaggacaacaggggctgggaatggaggggagaatttctaggggaagtttcctgagttgaaacttctcctgtggttactggtattgagaaatcagctaccaaacatgggtgaaaaaggacaagatcaagtcagttctaagactgctagagagagataccaagcccttagccttgctctcagtagcatcagccccaggtctgagcttccccacattacagcctccccacattacacttgacaaagcagtaaaggagggagcactttgggtcctgacactcatgtctggggaggaagagcaagaagaaaagtggcatttccttaattggaaagggggaaggatcttattgcacttgggctgttcagaatgtagaaaggacatatttgaggaagtatctatttgagcactgatttactctgtaaaaagcaaaatctctctgtcctaaactaatggaagcgattctcccatgctcatgtgtaatggttttaacgttactcactggagagattggactttctggagttatttaaccactatgttcagtattttaggactttatgataatttaatataaatttagcttttcttaatcaccttg

SEQ ID NO: 308 - RNA, 8055 nt, Macaca fascicularis
  source 1..8055: mol_type = mRNA
caaggtgattaagaaaagctaaatttatattaaattatcataaagtcctaaaatactgaacatagtggttaaataactccagaaagtccaatctctccagtgagtaacgttaaaaccattacacatgagcatgggagaatcgcttccattagtttaggacagagagattttgctttttacagagtaaatcagtgctcaaatagatacttcctcaaatatgtcctttctacattctgaacagcccaagtgcaataagatccttccccctttccaattaaggaaatgccacttttcttcttgctcttcctccccagacatgagtgtcaggacccaaagtgctccctcctttactgctttgtcaagtgtaatgtggggaggctgtaatgtggggaagctcagacctggggctgatgctactgagagcaaggctaagggcttggtatctctctctagcagtcttagaactgacttgatcttgtcctttttcacccatgtttggtagctgatttctcaataccagtaaccacaggagaagtttcaactcaggaaacttcccctagaaattctcccctccattcccagcccctgttgtcctctcctgccacttctaattcctgggggagaagaggtctgggtctgccatgggctaggagggcctcatcagtggtgctctctaccttcctactccttgcccacctctttgcatctttatttattcggccctcccaccacaggactttggagattgctggtgccacaaggcttggtcagaaaaagcaaattaggcaaaaaacaaacggaaaaaaaaaacaaaaaaataaaccaacccacgaagaacaactagggagacgttttagggcaaaaataagtctcagtttccctcatactaggctgagacacatgccctttgtgtgaatgagcatgaaccaagtgatggcatcccacacggaaaccaagccccttagctgaggagacagctggaagaggaacgtcaccaccccacagccacaggctcgctgtccactaatttagatccctgagcacttgagaaagaacacaggaagttcaacaggaagtttgaccctcatggatacttctctttaggccctgggtgtcccaagtctccaacctgattgttctttctgaccatttatgacaacttccgggtttctttgaaagcttgtttctaggtctcttccctagaatcccagggaatgagggcgagagggttcaggtggtataccatgtttggtctaggcagagcttcttagacttttcagagactcagcccccaaggcctaacattaattcaagccactggctcacaacctggttactctgatcaaagacttaggaaagatactggccagtggtggcaccaggagggaattcatattagccagtagcctcgtgatagggaacccagttatccgaaggtagaaagagctccacacattctagcaggaggaagaacagcttgagccacccccatctcaccagtatctgctgctgaaaaggcagtgactcttagggcaagaataatgtccactgccagcaatggaccagacacccagacccaactaccccccaaagctttttcatgttaccaacacacttgaggctgaaggttcccagatgcccatacctgctgggctgacttttccttcttctctcagcctctatccttcattcctctttacccacacccccttgtcccagcctctgatgggcaagttctctcagagaagcagtcatgctggctgtgatggggcagagcacagtcctgggtcatcagctgcatcagcactgagaagcaggcactgagggtaccgggggaaggggaggtggagctctacgctggcgaggaatcatgaataagcagtttcagggggcccaggacggagtacaagatgtgaggttcatggtaaaatccaggtctaaattctcgagatgcaccatcatttgttgtgcacaggtagttatggactcaggtggtaaacagctccagtgagggcttaggagcagttatggggtgggaggaggaggaggacgagcacacagaagaggggcctgcggtgtaagcaagcacaaggactagacgtccataaaggagaaggaacaggcaggcagggaagagaacgcgggcatttagacctggctctctgaggagagcttgcgttcatgtttccagcccgtgtctggcagagaacctcgtctttctggagtggctgcagtatggacgctgctacactcggactgctcttcctgtaacagctgctccgtctctgtgtcatccagggagccagagctggcctggatagacactgtgtctgtcttcatgcatacatgatcccggaggaggcccccccgtgagcttcgcagttgcttgaggtcatcccactcagcatcatccccagacaggaggcagattccctctacgatcttgatcttctccttggtgtagttatggtcaggccctccctctttcttatagcacagctggttgtacatggctggtttggggattgcttcaatcttcacttcctgtgtggatgttcggtaggaggggttgctataggtgaggttccccattccaggatcagtgaacttggattttttgtgtctgtacagcatcaaagctgcaatcaccaccaaaatcagcagaatactgaggagtccaccaatggcgtagctgatatgaagtccttcccctggagcagcaggaacggcctcattggaacgtgcacagaggcccagcctggcatccctttcggagcatcttccttccacctcctccagagacatgcgggtccgggtggttgaagaacgcaaggtggtaggtagtgtgttgggtagcaccgggctcttttcactcatgccagtggacctaggagctggtggtaccaggccaggcacaagagagcagggccggctatcacgttcgtcaggacaggcacatacgaagtccgaggctctggcaaagcagaggtgggtgcagccaccattgttcacgccacaggcattggtccctgtctgccgctgaggggaaaccacgatgatatccatgagtccttccacatttgccagcactgtctccttgttccggcctgagtatttgtcaacacgctggattgacttggtctgccagtctgtccagtagatccacctgtcttgctgtgtgagggcaaaggggtgggacacatggctgaccaagacctgccgcagtttcccgttgaggtcagcactctcgatccggtccagatgggcgtctacccagtagatcctgcgggtatcatagtccagggtgaggccgttgggccagcccaggtctgtgttgatgaggaccttccgctcagaaccgtccaggttcgcccgttcgatcttggcaatgtggccccagtctgtccagaagaggtaccccttcctggggaaaacagcaatggcccggggctcatccaggctattgttgatcagcactttgcggcaggaaccatccagcctggatgcctcaatggtatttcgacctgtgtctgtccagtacaggttcctggccacccagtccactgccagcccatcagtggtcttcagcccacgcccgatcactgtctccatgttgctgccattcaggtctgctcgcctgataacatccaggaacacatctgtgtaatagacctttccatccacgctgtcatagtccagggagatgacattgttgagctcaggaacagggacgtgcacatcggtgtggtcactggtgtccagtgagatacgccggatggagccacggctggagaagagcaggtaggtctcaggagagggatcacaggtcttcccatctcccttcagctggatgccagtggggcaggcacaggagaagccagaaggccgaggcaagcagaggtgggagcagccgccatttctggagccacacttgttaaaacctagtggctgtgctcggtccacagcctggatgtccatgaggcctggcaggttggacctcacgaggataacattgctgccggtacccttgtcggcacggtggatgctccgggtctgccagtcagtccagtatatataggagtcgaggagggtgaggccatatgggtgctgcactggtgacaccaacgtatgccgattggcaccattcaggtcagcagcctcaattcgctcggtgtgggcatcggcccacagcagttgggagctggccttgtccacagtcagtccattgggccatcctaggttgttgctgatgagcactgtgcggtctgagccatccattccagaccgctctaacttggcattctccccccagtctgtccagtacataaaccccatctcatggtacagtacgattgcccggggactgtcaaggttctgccacaccaacactttccgcatggacccgtccaggttgcccacttcaatccggtttgttcccgtgtctgtccagtacactttccggccaatggcatccaccgcgagcccatctgtggtctgtagccctgtggtgatgatgtcctcgtgctgtgaaccgtccagattggcacggctgatcctgtgcagtgtgctgtcagaccagtacacttttccttcctgggggtctactccaatggcaatggtgttcttcatggtaatgttgattggtaccaccacatcagcaaaataagggatgtccagggagaccatgcgaatgtctatcctcctggcgaagatgaggaaactgttcatgcctggtgagcaagtcttgccatcaggcagcaggttgatgcctgtggggcaggtacagctgaagccgcttggatttggggacctaagacacaggtggctacagccgccattctccatagcacatggtgtagacactgggggccggcggcggtggaagacatggatgtccatcaggttctccaggttctcctgcagagtctcccggtccagccctgtcagccggtcagcgctctgtatactcttagtctgccagtcagtccaatagatgcgctctccatagagggtcagcccaaatgggtgggggagctggcttccgatcagtaccttcctcttactgccatccagtccagcaaattcaattgtcttcatgccggcgtcagcccagtatagccgctgggaaccgtaatcaatagctagcccgttaggccaggtcagattagaagagataatgacttggcggcctgaggcatccatgccagctcgttcaatcttggggctcgcaccccagtcagtccaatacatgtacccgcccatgggttccaccacgatgtcccgaggacgatcaaggttctcccagatgagtactgttctcatgctgccatctgtgttggctacttcaatccggtctgtacctgcatctgtccagtacagtttgttggtgacccaatcaatggccaggccagctgggctctccaaactggtatccactaccacctcctgtcctgttccatcccacttggccctgctgatggtatcagtgctgacatctgtccagtacacgtggtcatcccgggagtcccagtcaagggccacagcactgcgtacgtcagccagtgggatgacatcatcagacaggtcctctgtgtcaaagctgattcgacggatgtccatccttcgggcaaaaagcaggaacttgtcaagactctgggcacaggcgtggctgctgatcttgcggaagccagtggggcaggcacaggtgtagttctggccactgggcagacacaggtgcgtgcagcctccgttgttgtccccacagcggttcttccctgcaggttggcgctgcgggtgcaaggtgtggatgtccatagggaagtggagtttgttgcgaatgatttcctggttcttccccgtaaatttgttagcgctattgatgctcttggtgtgccagtctgtccagtacaggctgtcttcaaacactgtgatggcgaagggatgcggaaggccctggctaatgacagccttacggtgactcccatccagattggccctctcaatgacatggtgcttagcatccacccagtacatacggcgcccagcatagtcgatggtgaggccattgggccagaagagatgggtatcagcaatgatgcggcgcccagagccatccatgctggaggcctcaatacggggggtgttgccccagtctgtccagtaaatggtaccctccatgggatgcaaggcaatggcccggggcttctccaggttctgccacagcagcaccttccggtgggccccgtccagattggccacctcaatccttgaggtgcctgagtcggtccagtagagtttgtcatggacccaatccacagccaggccccctgggctctccagcccagtagacacaacctcctccacgttgctgccgttgaggttggcacggaggatccggtccagggtgacgtctgaccagaagacaagctcgcggcggtggtggaaatcaagggcaatggcgttctccaggttgttaagcagcagcgtgtactcagagcggtgcggcagcacctgccggatgtcgatgcgattggcgaacagcagcacaggctctggccccagagccttgcagctgcgccggtcgggccgtagttcatagcctgtttcgcaccagcactggaaagccccttcgctgttggtgcaaccctggctgcaatacccctcgtcggcacactcattcacatcttggcacgtgtgcccatcctctgtgagccggtagcctgtgtggcaggtacactgcactgcccctcgcaccatctggcacttctgggcacagccaccgttgttaacattgcagttctcctcacctgtccggggccggcaattctgctgtgggctttcgtcgctgttgtcaccacagtcgttgaccccattgcacagcttcctctgcccaatgcagcgcccattccaacacaggaactggtccgaggcacactgggggcttcctgtattctcacagttctcttcatcgctattgtccgcacagtcgtcctccccatcacagcgccaggacaggcggacgcagcggcctgagcgacagcggaactgttctgctgtacacatggaggtggtgcagttgcgctcatcagactggtcatcacagtccgcgtcaccatcgcagcgccagcctgcattgatgcacaggccgctgtcacacatgaactccccagagcggcagggctggtgggaggagcagtcagactcgtccgaccagtctccgcagtcatcgtcgccatcgcagtggtagatatcgaggatacagcggccataggcacactggaactcctccaggttgcaggggggtgctggcactgctgagggacagctctcctcatcggagccatctttgcagtcggtgtcaccgtcgcagtaccagtgctcagcaatgcagcttccgtcactgcagcggaactccttgtcggagcacttgcgcatgtcacactgctcatcgctgttgtcaccacagtcattgtcaccatcgcagtgccacagactccggatgcagtagccgttctggcagggaaactcgtcctcctcacactcccgggggggacagtcctgctcatccgagtcatcctcacagtcgttgtccccgtcacacacccaggagcggcggatgcacttgccattgtcacagtgaaagtcgagaggggaacaggtaggtagcatacatccgtcctcatcgctgtggtccccgcagtcgttgtctccatcacactgccactgggcagggatgcaggtacactcgccaagagcactcactgcacatgtgaagtggctccgaccacaagcacactcggggctgctggccaggccgtgtgcgcagagcagggcgccaagcagcagcgcgccccactgccgcctcatggtgccgcccgcgccgcccgcccggggtcctgccgactcccgcgggacggcgcggtggcgaagcccgcggagggtccccgagggggaagcgtcccgggtgcacggcggcctgcgcgccccgcaagtcgccctccggacgccgccgcctcctccagtgctgccagagccgacgctgccccgccaggggac

SEQ ID NO: 309 - RNA, 8099 nt, Macaca mulatta
  source 1..8099: mol_type = mRNA
ggggctgcggcgcggggggcggggcggccgggcccgggacaccccctcccggtcccctggcggggcagcgtcggctctggcagcactggaggaggcggcggcgtccggagggcgacttgcggggcgcgcaggccgccgtgcacccgggacgcttccccctcggggaccctccgcgggcttctccgccgcgccgtcccgcgggagtcggcaggaccccgggcgggcggcgcgggcggcaccatgaggcggcagtggggcgcgctgctgcttggcgccctgctctgcgcacacggcctggccagcagccccgagtgtgcttgtggtcggagccacttcacatgtgcagtgagtgctcttggcgagtgtacctgcatccctgcccagtggcagtgtgatggagacaacgactgcggggaccacagcgatgaggacggatgtatgctacctacctgttcccctctcgactttcactgtgacaatggcaagtgcatccgccgctcctgggtgtgtgatggggacaacgactgtgaggatgactcggatgagcaggactgtcccccccgggagtgtgaggaggacgagtttccctgccagaacggctactgcatccggagtctgtggcactgcgatggtgacaatgactgtggtgacaacagcgatgagcagtgtgacatgcgcaagtgctccgacaaggagttccgctgcagtgacggaagctgcattgctgagcactggtactgcgacggtgacaccgactgcaaagatggctccgatgaggagagctgtccctcagcagtgccagcacccccctgcaacctggaggagttccagtgtgcctatggccgctgtatcctcgatatctaccactgcgatggcgacgatgactgcggagactggtcggacgagtctgactgctcctcccaccagccctgccgctctggggagttcatgtgtgacagcggcctgtgcatcaatgcaggctggcgctgcgatggtgacgcggactgtgatgaccagtctgatgagcgcaactgcaccacctccatgtgtacagcagaacagttccgctgtcgctcaggccgctgcgtccgcctgtcctggcgctgtgatggggaggacgactgtgcggacaatagcgatgaagagaactgtgagaatacaggaagcccccagtgtgcctcggaccagttcctgtgttggaatgggcgctgcattgggcagaggaagctgtgcaatggggtcaacgactgtggtgacaacagcgacgaaagcccacagcagaattgccggccccggacaggtgaggagaactgcaatgttaacaacggtggctgtgcccagaagtgccagatggtgcgaggggcagtgcagtgtacctgccacacaggctaccggctcacagaggatgggcacacgtgccaagatgtgaatgagtgtgccgacgaggggtattgcagccagggttgcaccaacagcgaaggggctttccagtgctggtgcgaaacaggctatgaactacggcccgaccggcgcagctgcaaggctctggggccagagcctgtgctgctgttcgccaatcgcatcgacatccggcaggtgctgccgcaccgctctgagtacacgctgctgcttaacaacctggagaacgccattgcccttgatttccaccaccgccgcgagcttgtcttctggtcagacgtcaccctggaccggatcctccgtgccaacctcaacggcagcaacgtggaggaggttgtgtctactgggctggagagcccagggggcctggctgtggattgggtccatgacaaactctactggaccgactcaggcacctcaaggattgaggtggccaatctggacggggcccaccggaaggtgctgctgtggcagaacctggagaagccccgggccattgccttgcatcccatggagggtaccatttactggacagactggggcaacaccccccgtattgaggcctccagcatggatggctctggacgccgcatcattgctgatacccatctcttctggcccaatggcctcaccatcgactatgctgggcgccgtatgtactgggtggatgctaagcaccatgtcattgagagggccaatctggatgggagtcaccgtaaggctgtcattagccagggccttccgcatcccttcgccatcacagtgtttgaagacagcctgtactggacagactggcacaccaagagcatcaatagcgctaacaaatttacggggaagaaccaggaaatcattcgcaacaaactccacttccctatggacatccacaccttgcacccgcagcgccaacctgcagggaagaaccgctgtggggacaacaacggaggctgcacgcacctgtgtctgcccagtggccagaactacacctgtgcctgccccactggcttccgcaagatcagcagccacgcctgtgcccagagtcttgacaagttcctgctttttgcccgaaggatggacatccgtcgaatcagctttgacacagaggacctgtctgatgatgtcatcccactggctgacgtacgcagtgctgtggcccttgactgggactcccgggatgaccacgtgtactggacagatgtcagcactgataccatcagcagggccaagtgggatggaacaggacaggaggtggtagtggataccagtttggagagcccagctggcctggccattgattgggtcaccaacaaactgtactggacagatgcaggtacagaccggattgaagtagccaacacagatggcagcatgagaacagtactcatctgggagaaccttgatcgtcctcgggacatcgtggtggaacccatgggcgggtacatgtattggactgactggggtgcgagccccaagattgaacgagctggcatggatgcctcaggccgccaagtcattatctcttctaatctgacctggcctaacgggctagctattgattacggttcccagcggctatactgggctgacgccggcatgaagacaattgaatttgctggactggatggcagtaagaggaaggtactgatcggaagccagctcccccacccatttgggctgaccctctatggagagcgcatctattggactgactggcagactaagagtatacagagcgctgaccggctgacagggctggaccgggagactctgcaggagaacctggagaacctgatggacatccatgtcttccaccgccgccggcccccagtgtctacaccatgtgctatggagaatggcggctgtagccacctgtgtcttaggtccccaaatccaagcggcttcagctgtacctgccccacaggcatcaacctgctgcctgatggcaagacttgctcaccaggcatgaacagtttcctcatcttcgccaggaggatagacattcgcatggtctccctggacatcccttattttgctgatgtggtggtaccaatcaacattaccatgaagaacaccattgccattggagtagacccccaggaaggaaaagtgtactggtctgacagcacactgcacaggatcagccgtgccaatctggacggttcacagcacgaggacatcatcaccacagggctacagaccacagatgggctcgcggtggatgccattggccggaaagtgtactggacagacacgggaacaaaccggattgaagtgggcaacctggacgggtccatgcggaaagtgttggtgtggcagaaccttgacagtccccgggcaatcgtactgtaccatgagatggggtttatgtactggacagactggggggagaatgccaagttagagcggtccggaatggatggctcagaccgcacagtgctcatcagcaacaacctaggatggcccaatggactgactgtggacaaggccagctcccaactgctgtgggccgatgcccacaccgagcgaattgaggctgctgacctgaatggtgccaatcggcatacgttggtatcaccagtgcagcacccatatggcctcaccctcctcgactcctatatatactggactgactggcagacccggagcatccaccgtgccgacaagggtaccggcagcaatgttatcctcgtgaggtccaacctgccaggcctcatggacatccaggctgtggaccgagcacagccactaggttttaacaagtgtggctcgagaaatggcggctgctcccacctctgcttgcctcggccttctggcttctcctgtgcctgccccactggcatccagctgaagggagatgggaagacctgtgatccctctcctgagacctacctgctcttctccagccgtggctccatccggcgtatctcactggacaccagtgaccacaccgatgtgcacgtccctgttcctgagctcaacaatgtcatctccctggactatgacagcgtggatggaaaggtctattacacagatgtgttcctggatgttatcaggcgagcagacctgaatggcagcaacatggagacagtgatcgggcgtgggctgaagaccactgatgggctggcagtggactgggtggccaggaacctgtactggacagacacaggtcgaaataccattgaggcatccaggctggatggttcctgccgcaaagtgctgatcaacaatagcctggatgagccccgggccattgctgttttccccaggaaggggtacctcttctggacagactggggccacattgccaagatcgaacgggcgaacctggacggttctgagcggaaggtcctcatcaacacagacctgggctggcccaacggcctcaccctggactatgatacccgcaggatctactgggtagacgcccatctggaccggatcgagagtgctgacctcaacgggaaactgcggcaggtcttggtcagccatgtgtcccacccctttgccctcacacagcaagacaggtggatctactggacagactggcagaccaagtcaatccagcgtgttgacaaatactcaggccggaacaaggagacagtgctggcaaatgtggaaggactcatggatatcatcgtggtttcccctcagcggcagacagggaccaatgcctgtggcgtgaacaatggtggctgcacccacctctgctttgccagagcctcggacttcgtatgtgcctgtcctgacgaacgtgatagccggccctgctctcttgtgcctggcctggtaccaccagctcctaggtccactggcatgagtgaaaagagcccggtgctacccaacacactacctaccaccttgcgttcttcaaccacccggacccgcatgtctctggaggaggtggaaggaagatgctccgaaagggatgccaggctgggcctctgtgcacgttccaatgaggccgttcctgctgctccaggggaaggacttcatatcagctatgccattggtggactcctcagtattctgctgattttggtggtgattgcagctttgatgctgtacagacacaaaaaatccaagttcactgatcctggaatggggaacctcacctacagcaacccctcctaccgaacatccacacaggaagtgaagattgaagcaatccccaaaccagccatgtacaaccagctgtgctataagaaagagggagggcctgaccataactacaccaaggagaagatcaagatcgtagagggaatctgcctcctgtctggggatgatgctgagtgggatgacctcaagcaactgcgaagctcacgggggggcctcctccgggatcatgtatgcatgaagacagacacagtgtctatccaggccagctctggctccctggatgacacagagacggagcagctgttacaggaagagcagtccgagtgtagcagcgtccatactgcagccactccagaaagacgaggttctctgccagacacgggctggaaacatgaacgcaagctctcctcagagagccaggtctaaatgcccgcgttctcttccctgcctgcctgttccttctcctttatggacgtctagtccttgtgcttgcttacaccgcaggcccctcttctgtgtgctcgtcctcctcctcctcccaccccataactgctcctaagccctcactggagctgtttaccacctgagtccataactacctgtgcacaacaaatgatggtgcatctcgagaatttagacctggattttaccatgaacctcacatcttgtactccgtcctgggccccctgaaactgcttattcatgattcctcgccagcgtagagctccacctccccttcccccggtaccctcagtgcctgcttctcagtgctgatgcagctgatgacccaggactgtgctctgccccatcacagccagcatgactgcttctctgagagaacttgcccatcagaggctgggacaagggggtgtgggtaaagagggatgaaggatagaggctgagagaagaaggaaaagtcagcccagcaggtatgggcatctgggaaccttcagcctcaagtgtgttggtaacatgaaaaagctttggggggtagttgggtctgggtgtctggtccattgctggcagtggacattattcttgccctaagagtcactgccttttcagcagcagatactggtgagatgggggtggctcaagctgttcttcctcctgctagaatgtgtggagctctttctaccttcggataactgggttccctatcacgaggctactggctaatatgaattccctcctggtgccaccactggccagtatctttcctaagtctttgatcagagtaaccaggttgtgagccagtggcttgaatgaatgttaggccttggggctgagtctctgaaaagtctaagaagctctgcctagaccaaacatggtataccacctgaaccctctcgccctcattccctgggattctagggaagagacctagaaacaagctttcaaagaaacccggaagttgtcataaatggtcagaaagaacaatcaggttggagacttgggacacccagggcctaaagagaagtatccatgagggtcaaacttcctgttgaacttcctgtgttctttctcaagtgctcagggatctaaattagtggacagcgagcctgtggctgtggggtggtgacgttcctcttccagctgtctcctcagctaaggggcttggtttccatgtgggatgccatcacttggttcatgctcattcacacaaagggcatgtgtctcagcctagtatgagggaaactgagacttatttttgccctaaaacgtctccctagttgttcttcgtgggttggtttatttttttgttttttttttccgtttgtttttgcctaatttgctttttctgaccaagccttgtggcaccagcaatctccaaagtcctgtggtgggagggccgaataaataaagatgcaaagaggtgggcaaggagtaggaaggtagagagcaccactgatgaggccctcctagcccatggcagacccagacctcttctcccccaggaattagaagtggcaggagaggacaacaggggctgggaatggaggggagaatttctaggggaagtttcctgagttgaaacttctcctgtggttactggtattgagaaatcagctaccaaacatgggtgaaaaaggacaagatcaagtcagttctaagactgctagagagagataccaagcccttagccttgttctcagtagcatcagccccaggtctgagcttccccacattacagcctccccacattacacttgacaaagcagtaaaggagggagcactttgggtcctgacactcatgtctggggaggaagagcaagaagaaaagtggcatttccttaattggaaagggggaaggatcttattgcacttgggctgttcagaatgtagaaaggacatatttgaggaagtatctatttgagcactgatttactctgtaaaaagcaaaatctctctgtcctaaactaatggaagcgattctcccatgctcatgtgtaatggttttaacgttactcactggagagattggactttctggagttatttaaccactatgttcagtattttaggactttatgataatttaatataaatttagcttttcttaatca

SEQ ID NO: 310 - RNA, 8099 nt, Macaca mulatta
  source 1..8099: mol_type = mRNA
tgattaagaaaagctaaatttatattaaattatcataaagtcctaaaatactgaacatagtggttaaataactccagaaagtccaatctctccagtgagtaacgttaaaaccattacacatgagcatgggagaatcgcttccattagtttaggacagagagattttgctttttacagagtaaatcagtgctcaaatagatacttcctcaaatatgtcctttctacattctgaacagcccaagtgcaataagatccttccccctttccaattaaggaaatgccacttttcttcttgctcttcctccccagacatgagtgtcaggacccaaagtgctccctcctttactgctttgtcaagtgtaatgtggggaggctgtaatgtggggaagctcagacctggggctgatgctactgagaacaaggctaagggcttggtatctctctctagcagtcttagaactgacttgatcttgtcctttttcacccatgtttggtagctgatttctcaataccagtaaccacaggagaagtttcaactcaggaaacttcccctagaaattctcccctccattcccagcccctgttgtcctctcctgccacttctaattcctgggggagaagaggtctgggtctgccatgggctaggagggcctcatcagtggtgctctctaccttcctactccttgcccacctctttgcatctttatttattcggccctcccaccacaggactttggagattgctggtgccacaaggcttggtcagaaaaagcaaattaggcaaaaacaaacggaaaaaaaaaacaaaaaaataaaccaacccacgaagaacaactagggagacgttttagggcaaaaataagtctcagtttccctcatactaggctgagacacatgccctttgtgtgaatgagcatgaaccaagtgatggcatcccacatggaaaccaagccccttagctgaggagacagctggaagaggaacgtcaccaccccacagccacaggctcgctgtccactaatttagatccctgagcacttgagaaagaacacaggaagttcaacaggaagtttgaccctcatggatacttctctttaggccctgggtgtcccaagtctccaacctgattgttctttctgaccatttatgacaacttccgggtttctttgaaagcttgtttctaggtctcttccctagaatcccagggaatgagggcgagagggttcaggtggtataccatgtttggtctaggcagagcttcttagacttttcagagactcagccccaaggcctaacattcattcaagccactggctcacaacctggttactctgatcaaagacttaggaaagatactggccagtggtggcaccaggagggaattcatattagccagtagcctcgtgatagggaacccagttatccgaaggtagaaagagctccacacattctagcaggaggaagaacagcttgagccacccccatctcaccagtatctgctgctgaaaaggcagtgactcttagggcaagaataatgtccactgccagcaatggaccagacacccagacccaactaccccccaaagctttttcatgttaccaacacacttgaggctgaaggttcccagatgcccatacctgctgggctgacttttccttcttctctcagcctctatccttcatccctctttacccacacccccttgtcccagcctctgatgggcaagttctctcagagaagcagtcatgctggctgtgatggggcagagcacagtcctgggtcatcagctgcatcagcactgagaagcaggcactgagggtaccgggggaaggggaggtggagctctacgctggcgaggaatcatgaataagcagtttcagggggcccaggacggagtacaagatgtgaggttcatggtaaaatccaggtctaaattctcgagatgcaccatcatttgttgtgcacaggtagttatggactcaggtggtaaacagctccagtgagggcttaggagcagttatggggtgggaggaggaggaggacgagcacacagaagaggggcctgcggtgtaagcaagcacaaggactagacgtccataaaggagaaggaacaggcaggcagggaagagaacgcgggcatttagacctggctctctgaggagagcttgcgttcatgtttccagcccgtgtctggcagagaacctcgtctttctggagtggctgcagtatggacgctgctacactcggactgctcttcctgtaacagctgctccgtctctgtgtcatccagggagccagagctggcctggatagacactgtgtctgtcttcatgcatacatgatcccggaggaggcccccccgtgagcttcgcagttgcttgaggtcatcccactcagcatcatccccagacaggaggcagattccctctacgatcttgatcttctccttggtgtagttatggtcaggccctccctctttcttatagcacagctggttgtacatggctggtttggggattgcttcaatcttcacttcctgtgtggatgttcggtaggaggggttgctgtaggtgaggttccccattccaggatcagtgaacttggattttttgtgtctgtacagcatcaaagctgcaatcaccaccaaaatcagcagaatactgaggagtccaccaatggcatagctgatatgaagtccttcccctggagcagcaggaacggcctcattggaacgtgcacagaggcccagcctggcatccctttcggagcatcttccttccacctcctccagagacatgcgggtccgggtggttgaagaacgcaaggtggtaggtagtgtgttgggtagcaccgggctcttttcactcatgccagtggacctaggagctggtggtaccaggccaggcacaagagagcagggccggctatcacgttcgtcaggacaggcacatacgaagtccgaggctctggcaaagcagaggtgggtgcagccaccattgttcacgccacaggcattggtccctgtctgccgctgaggggaaaccacgatgatatccatgagtccttccacatttgccagcactgtctccttgttccggcctgagtatttgtcaacacgctggattgacttggtctgccagtctgtccagtagatccacctgtcttgctgtgtgagggcaaaggggtgggacacatggctgaccaagacctgccgcagtttcccgttgaggtcagcactctcgatccggtccagatgggcgtctacccagtagatcctgcgggtatcatagtccagggtgaggccgttgggccagcccaggtctgtgttgatgaggaccttccgctcagaaccgtccaggttcgcccgttcgatcttggcaatgtggccccagtctgtccagaagaggtaccccttcctggggaaaacagcaatggcccggggctcatccaggctattgttgatcagcactttgcggcaggaaccatccagcctggatgcctcaatggtatttcgacctgtgtctgtccagtacaggttcctggccacccagtccactgccagcccatcagtggtcttcagcccacgcccgatcactgtctccatgttgctgccattcaggtctgctcgcctgataacatccaggaacacatctgtgtaatagacctttccatccacgctgtcatagtccagggagatgacattgttgagctcaggaacagggacgtgcacatcggtgtggtcactggtgtccagtgagatacgccggatggagccacggctggagaagagcaggtaggtctcaggagagggatcacaggtcttcccatctcccttcagctggatgccagtggggcaggcacaggagaagccagaaggccgaggcaagcagaggtgggagcagccgccatttctcgagccacacttgttaaaacctagtggctgtgctcggtccacagcctggatgtccatgaggcctggcaggttggacctcacgaggataacattgctgccggtacccttgtcggcacggtggatgctccgggtctgccagtcagtccagtatatataggagtcgaggagggtgaggccatatgggtgctgcactggtgataccaacgtatgccgattggcaccattcaggtcagcagcctcaattcgctcggtgtgggcatcggcccacagcagttgggagctggccttgtccacagtcagtccattgggccatcctaggttgttgctgatgagcactgtgcggtctgagccatccattccggaccgctctaacttggcattctccccccagtctgtccagtacataaaccccatctcatggtacagtacgattgcccggggactgtcaaggttctgccacaccaacactttccgcatggacccgtccaggttgcccacttcaatccggtttgttcccgtgtctgtccagtacactttccggccaatggcatccaccgcgagcccatctgtggtctgtagccctgtggtgatgatgtcctcgtgctgtgaaccgtccagattggcacggctgatcctgtgcagtgtgctgtcagaccagtacacttttccttcctgggggtctactccaatggcaatggtgttcttcatggtaatgttgattggtaccaccacatcagcaaaataagggatgtccagggagaccatgcgaatgtctatcctcctggcgaagatgaggaaactgttcatgcctggtgagcaagtcttgccatcaggcagcaggttgatgcctgtggggcaggtacagctgaagccgcttggatttggggacctaagacacaggtggctacagccgccattctccatagcacatggtgtagacactgggggccggcggcggtggaagacatggatgtccatcaggttctccaggttctcctgcagagtctcccggtccagccctgtcagccggtcagcgctctgtatactcttagtctgccagtcagtccaatagatgcgctctccatagagggtcagcccaaatgggtgggggagctggcttccgatcagtaccttcctcttactgccatccagtccagcaaattcaattgtcttcatgccggcgtcagcccagtatagccgctgggaaccgtaatcaatagctagcccgttaggccaggtcagattagaagagataatgacttggcggcctgaggcatccatgccagctcgttcaatcttggggctcgcaccccagtcagtccaatacatgtacccgcccatgggttccaccacgatgtcccgaggacgatcaaggttctcccagatgagtactgttctcatgctgccatctgtgttggctacttcaatccggtctgtacctgcatctgtccagtacagtttgttggtgacccaatcaatggccaggccagctgggctctccaaactggtatccactaccacctcctgtcctgttccatcccacttggccctgctgatggtatcagtgctgacatctgtccagtacacgtggtcatcccgggagtcccagtcaagggccacagcactgcgtacgtcagccagtgggatgacatcatcagacaggtcctctgtgtcaaagctgattcgacggatgtccatccttcgggcaaaaagcaggaacttgtcaagactctgggcacaggcgtggctgctgatcttgcggaagccagtggggcaggcacaggtgtagttctggccactgggcagacacaggtgcgtgcagcctccgttgttgtccccacagcggttcttccctgcaggttggcgctgcgggtgcaaggtgtggatgtccatagggaagtggagtttgttgcgaatgatttcctggttcttccccgtaaatttgttagcgctattgatgctcttggtgtgccagtctgtccagtacaggctgtcttcaaacactgtgatggcgaagggatgcggaaggccctggctaatgacagccttacggtgactcccatccagattggccctctcaatgacatggtgcttagcatccacccagtacatacggcgcccagcatagtcgatggtgaggccattgggccagaagagatgggtatcagcaatgatgcggcgtccagagccatccatgctggaggcctcaatacggggggtgttgccccagtctgtccagtaaatggtaccctccatgggatgcaaggcaatggcccggggcttctccaggttctgccacagcagcaccttccggtgggccccgtccagattggccacctcaatccttgaggtgcctgagtcggtccagtagagtttgtcatggacccaatccacagccaggccccctgggctctccagcccagtagacacaacctcctccacgttgctgccgttgaggttggcacggaggatccggtccagggtgacgtctgaccagaagacaagctcgcggcggtggtggaaatcaagggcaatggcgttctccaggttgttaagcagcagcgtgtactcagagcggtgcggcagcacctgccggatgtcgatgcgattggcgaacagcagcacaggctctggccccagagccttgcagctgcgccggtcgggccgtagttcatagcctgtttcgcaccagcactggaaagccccttcgctgttggtgcaaccctggctgcaatacccctcgtcggcacactcattcacatcttggcacgtgtgcccatcctctgtgagccggtagcctgtgtggcaggtacactgcactgcccctcgcaccatctggcacttctgggcacagccaccgttgttaacattgcagttctcctcacctgtccggggccggcaattctgctgtgggctttcgtcgctgttgtcaccacagtcgttgaccccattgcacagcttcctctgcccaatgcagcgcccattccaacacaggaactggtccgaggcacactgggggcttcctgtattctcacagttctcttcatcgctattgtccgcacagtcgtcctccccatcacagcgccaggacaggcggacgcagcggcctgagcgacagcggaactgttctgctgtacacatggaggtggtgcagttgcgctcatcagactggtcatcacagtccgcgtcaccatcgcagcgccagcctgcattgatgcacaggccgctgtcacacatgaactccccagagcggcagggctggtgggaggagcagtcagactcgtccgaccagtctccgcagtcatcgtcgccatcgcagtggtagatatcgaggatacagcggccataggcacactggaactcctccaggttgcaggggggtgctggcactgctgagggacagctctcctcatcggagccatctttgcagtcggtgtcaccgtcgcagtaccagtgctcagcaatgcagcttccgtcactgcagcggaactccttgtcggagcacttgcgcatgtcacactgctcatcgctgttgtcaccacagtcattgtcaccatcgcagtgccacagactccggatgcagtagccgttctggcagggaaactcgtcctcctcacactcccgggggggacagtcctgctcatccgagtcatcctcacagtcgttgtccccatcacacacccaggagcggcggatgcacttgccattgtcacagtgaaagtcgagaggggaacaggtaggtagcatacatccgtcctcatcgctgtggtccccgcagtcgttgtctccatcacactgccactgggcagggatgcaggtacactcgccaagagcactcactgcacatgtgaagtggctccgaccacaagcacactcggggctgctggccaggccgtgtgcgcagagcagggcgccaagcagcagcgcgccccactgccgcctcatggtgccgcccgcgccgcccgcccggggtcctgccgactcccgcgggacggcgcggcggagaagcccgcggagggtccccgagggggaagcgtcccgggtgcacggcggcctgcgcgccccgcaagtcgccctccggacgccgccgcctcctccagtgctgccagagccgacgctgccccgccaggggaccgggagggggtgtcccgggcccggccgccccgccccccgcgccgcagcccc

SEQ ID NO: 311 - RNA, 8294 nt, Homo sapiens
  source 1..8294: mol_type = mRNA
agtcattagcagacaacccttttgcaacaaagtatgctttaaaatgtaaactgtggagccattttccttgcgttgtccagaaggaacttcgtcctgcgtgagcctggattaatcatgagagagctcgtcaacattccactggtacatattcttactctggttgccttcagcggaactgagaaacttccaaaagctcctgtcatcaccactcctcttgaaacagtggatgccttagttgaagaagtggctactttcatgtgtgcagtggaatcctacccccagcctgagatttcctggactagaaataaaattctcattaaactctttgacacccggtacagcatccgggagaatgggcagctcctcaccatcctgagtgtggaagacagtgatgatggcatttactgctgcacggccaacaatggtgtgggaggagctgtggagagttgtggagccctgcaagtgaagatgaaacctaaaataactcgtcctcccataaatgtgaaaataatagagggattaaaagcagtcctaccatgtactacaatgggtaatcccaaaccatcagtgtcttggataaagggagacagccctctcagggaaaattcccgaattgcagttcttgaatctgggagcttgaggattcataacgtacaaaaggaagatgcaggacagtatcgatgtgtggcaaaaaacagcctcgggacagcatattccaaagtggtgaagctggaagttgaggtttttgccaggatcctgcgggctcctgaatcccacaatgtcacctttggctcctttgtgaccctgcactgtacagcaacaggcattcctgtccccaccatcacctggattgaaaacggaaatgctgtttcttctgggtccattcaagagagtgtgaaagaccgagtgattgactcaagactgcagctgtttatcaccaagccaggactctacacatgcatagctaccaataagcatggggagaagttcagtactgccaaggctgcagccaccatcagcatagcagaatggagtaaaccacagaaagataacaaaggctactgcgcccagtacagaggggaggtgtgtaatgcagtcctggcaaaagatgctcttgtttttctcaacacctcctatgcggaccctgaggaggcccaagagctactggtccacacggcctggaatgaactgaaagtagtgagcccagtctgccggccagctgctgaggctttgttgtgtaaccacatcttccaggagtgcagtcctggagtagtgcctactcctattcccatttgcagagagtactgcttggcagtaaaggagctcttctgcgcaaaagaatggctggtaatggaagagaagacccacagaggactctacagatccgagatgcatttgctgtccgtgccagaatgcagcaagcttcccagcatgcattgggaccccacggcctgtgccagactgccacatctagattataacaaagaaaacctaaaaacattcccaccaatgacgtcctcaaagccaagtgtggacattccaaatctgccttcctcctcctcttcttccttctctgtctcacctacatactccatgactgtaataatctccatcatgtccagctttgcaatatttgtgcttcttaccataactactctctattgctgccgaagaagaaaacaatggaaaaataagaaaagagaatcagcagcagtaaccctcaccacactgccttctgagctcttactagatagacttcatcccaaccccatgtaccagaggatgccgctccttctgaaccccaaattgctcagcctggagtatccaaggaataacattgaatatgtgagagacatcggagagggagcgtttggaagggtgtttcaagcaagggcaccaggcttacttccctatgaacctttcactatggtggcagtaaagatgctcaaagaagaagcctcggcagatatgcaagcggactttcagagggaggcagccctcatggcagaatttgacaaccctaacattgtgaagctattaggagtgtgtgctgtcgggaagccaatgtgcctgctctttgaatacatggcctatggtgacctcaatgagttcctccgcagcatgtcccctcacaccgtgtgcagcctcagtcacagtgacttgtctatgagggctcaggtctccagccctgggcccccacccctctcctgtgctgagcagctttgcattgccaggcaggtggcagctggcatggcttacctctcagaacgtaagtttgttcaccgagatttagccaccaggaactgcctggtgggcgagaacatggtggtgaaaattgccgactttggcctctccaggaacatctactcagcagactactacaaagctaatgaaaacgacgctatccctatccgttggatgccaccagagtccattttttataaccgctacactacagagtctgatgtgtgggcctatggcgtggtcctctgggagatcttctcctatggcctgcagccctactatgggatggcccatgaggaggtcatttactacgtgcgagatggcaacatcctctcctgccctgagaactgccccgtggagctgtacaatctcatgcgtctatgttggagcaagctgcctgcagacagacccagtttcaccagtattcaccgaattctggaacgcatgtgtgagagggcagagggaactgtgagtgtctaaggttgaagacgttcaaataaaatgctgcagtttcctctcagactctgtgagccaggggaatcctacaccagaggcccaacaagacccacataggaaagagtaagagtaaacatgagtagtgtgttgtttgcttcccagggagagcaaagacagtgcaaaacccatgtggtagacggacccattgaaagccagtgattggaaacacaggctaggaaatgtgtcagataatggagacaactattcttcttcatgaaggtttgtaatacacactgcacagggaagaatgtcatcctgttcagtttccaaagtagctggtcacagagtaaagctctgctgtattaaattttaatatgaaatgggattcagagcttcattttttaattgagttaattcctgtccattgtgaaagtagcttaatcgtcatgtaagacacttaggtgaagtacagaaaactaaaaagaaggaaaagccactcattctgtctccccccaaagacgagtcttagtgttttattaaatctttcttgcatttaatgcataattttatatttgtttgtattctgcagagttgtggttacattttattgatagagggtttctaaggaatgaaacagcaaatcagcaagcctgtaactctgagttcccttttctgtcctgtgcccctccttttttcctttctgtgcatttgtcatgaattaagtctgcttattttattcctccagttttcttgaaacaagtttttgtatcttactgatttaccttttcctttaaaaattgtattggtatcttttccattgctttaatctttatttcttcttctttccaggacttctgtccttttttagttattaagctatttttttcttttatttcattcatgtaataaacactctggcagaaataataacattttaaataccattgtagattgatatgtatatgccttttgcaaagtattactatttttcctgcatttgcctttgaagccacacatttcaacattctcacctattaatattattactagagtctatttaaatctcttaaaccataatttataatatgagatttcacaagatacacttgtggctctgagttatttcaaaactgatatttctgtgcattctgacattttattccttttagaaacaaattcagttggctgtagaattaatatcgttctgcttaacaactttgtgcatgacatattaactgattttgttgtatttcatgatttaaaaaaaaaagcagcagctctggaactcagattcctgggggttcagattttttctcagtggatcctcacacaatacatctttatctaagtccatacatgatctgagtttatttctgatatagcaggaacccaaattctcctgaaaacgaacagggaagagaaaataacagtctactctataccagcttatcttaattcagactaattggtagttagggcattggaggaatggtgtgaattcttgaaagtagattttcgctgtctgctggaaaactctgcctgaaatccccaaatctgcctcatgtaacagcttgacatctttggtgggaaacctgccatttcttattcatagtgtctccaggcaaccaagacaaaaatgtagaaattttcctagactttgccctctctttcatcatcagttttctattagttttacttcctaaaatcctcctgctgacatcctcttcccttcaacccaagagccaatgactcaacctctaccgttgcccaccctgtctattagctggccttcctctcatttcagacctgaacagattctgtaggatacaacgacagtaaggcggtccttagtcacagttctggttcataaatagcgaggtcagcatttaggactgagacctaaagaagtgcttcagataaaaatcatgagtctaagtccaaaattgatactgtaatccaaatgactgaataaagaataaagttgcagcgtgtgtctaaagcagaaagtcaagatgccaacaaagcagaaaagttggagagggccaccagcaagtctagaacttgagcatagatatccatggcttattttagatggttcatgtatgctctgcaaaattcaaagacagcttcgggctttctccgctgataaagttttgttgtaaaagacagacatagaagtcaggctgacagaaaatagagtaacagtaatcataaaaattataatatcagctagcatttattgaaatcttaccatgtgtattctgaggcctttaaatatatgaacttaaacctcacaacatccctgtaatgttggtactatcattatatacattttagttttgctttgttttgttttgtttttgagacggagtctcgctctgtcgcccaggctggagtgcagtggcacgatcttggctcactgcaagctcagcctccaacagtcacagagagattgtgcaactggcccgagtgcacacagcaacagagcctactttttgaccaaaagaggccgaattctcaaccactatactgtagagcctctgtacatgatagaagcaataactgaacctcagtaactctgtggaagtgatttgtaatttgcatgtcgtttcaagcacactctatatctatattttattctattaacttcctaagtctttttaatgaatagcaaaaaaagtatatttcagcattatcaatttaagttaatcataacatctaataggtgacatgtttattttttcatgagttctaattacattttcaagttaagatcactgacttattccctaagtgctcgatctaatgttctgaatcacaggagtatagatgcattattcaccaatattgtttacttttttaaataagattttttttcatggtagaatcatcatatacattcaaaaaggtagacaaaagagagacactcacagtgtcactgttaccaagtgccaggacagatatcagtaaggcaccagcagtcatttttagtgatcaaataccaaacatggtaagataccagagtatttttcacatgacacccaaaaacatattctctgctatcgtggtagagcagaaaaagaacactttcttttcattttacagtatattacgaacctgttccacgtcattaaatattcttctaaaaacccaattttggaataatattctattttattcatatactgtaatttagctaatcaatcttgtatttttgaacatttaggttttttccaatttttatcattataaaaaatgctgtaattaacatccttatttgttcatgtccacatttctttttatgaaaattcagagaaaggaaatgtctggaccaaatggcatgtacaatattaacacttctgttatgtggtttcatattctgcagaaatattactgccacttctacattgtacaagagatctcatagccctaaacatttgctttcatagataattttctgttttttagaaatcttttgtctctttggttatagaaaaagagaacctctttttaattttattttttaaattactagtcaggttgaatgtttcttgttcctaggtcattaacagtttttattttggcaattgtctacagcccatttttctgctgtgttcattttctaatcgaattatgggatttatcttgtaaaaagcctattaagcctttttcatactttacacaagagatcacatctacttactttaccttaaaataacatttacttattttcttataaaagtaatatattatgtttgaaaagaaaaataatatgcaataatatacaataatatgtataatcataatagacaataataaaaatgaaaaaacaccaaccagaggtaattaacattaacatcataatattcttccaggctttttcagatagacaggtaggtaagtaggttggtaggtaaatagatagatagatgatacatagagagagatagatagataatttaaacaaaaataagatcatactgctacattacttcaagccttgcttttatcacttaatatatcttaaacatcttctacatgaacaagtattcatgtgcaacattaattttgatggttgaatagtattatacagatttatcgtaattgacataactattctactgttagacatttggtttatttctatttttccattataaaatgtaatgtttggatcatcctgttgctaaattttgtaagcatttatcttaagtgatttctttagctataactcctagaagtgaaatttctagattaaaggataaatgcacttttaatactttttaaatatattaaaaaattaccttcctgaattattttattaacatgtacctctcctagtcagataagacagcccatttatttcagtctcaccaatactgagtatagcattttaatcattgccaatataatagctaatagcttaaagttatttcatagcttatatttacacttctttaaatactaataaaattgaacattgtttaatgttttgaggatacttgattggtgatttgcctcctactattatttttctactgggtatatctttttcttgttgctttgtaagagcactttatatattaaggagttaaattttgtgatatatgtttcaactacttttatcatgttaaaaatatagacttctatttgtcttttattgtaggttttatcaatcagaaaagaatgttgacttttccgtccattcagatgattgtggcttttttccctaatggatttgttaatatgttcaattgtatgaatttatttcctaatgtagcgatatccttgtcttctaggaataaactttttgggcgaatcatatcaatcttctacttaactaccaaattaatttacatatatttgcatcaatattaagttcataaaattaaaagtttatcattttcatctctgttagagttttgtattggcattagcatttgtattagcattgtattaggaaaaactcaggagtttttctctataatcttggttagtttatttttaaataattgttatttatgaaagtaatacataaaaatgttgtttaaaaaaactcacaagagggtaaaaattaaaaaaataataaaagttcccttcttccttttcatctctagtcccagcctaagtgctaaccacttcacccatttatagtgttagttcttctggtgattaccagtgcaattctaacaaataggtttgcatttctctttctgaattgatcaattttttaaaaatatgcagcactctgactcaaactccctttctttttcctgagatatgttaacttctaatgttatattgtttatcacaactttcacaaatatttctaaataaaggttacctactgattctggattgtgctacataaaattagagcttccaaatttccctccatcacttctccctgctctctactctcacaatcagtcaactatacacctatttctacgctgtcaactatatgttcatttctatgaatctgtaatatttgcattttgttctggaacaaattaagatttaggtgctttgactagattgattctaaacatcaaaaaacaaaaataaaatatctgcaattatgtgatcatgta

SEQ ID NO: 312 - RNA, 8294 nt, Homo sapiens
  source 1..8294: mol_type = mRNA
tacatgatcacataattgcagatattttatttttgttttttgatgtttagaatcaatctagtcaaagcacctaaatcttaatttgttccagaacaaaatgcaaatattacagattcatagaaatgaacatatagttgacagcgtagaaataggtgtatagttgactgattgtgagagtagagagcagggagaagtgatggagggaaatttggaagctctaattttatgtagcacaatccagaatcagtaggtaacctttatttagaaatatttgtgaaagttgtgataaacaatataacattagaagttaacatatctcaggaaaaagaaagggagtttgagtcagagtgctgcatatttttaaaaaattgatcaattcagaaagagaaatgcaaacctatttgttagaattgcactggtaatcaccagaagaactaacactataaatgggtgaagtggttagcacttaggctgggactagagatgaaaaggaagaagggaacttttattatttttttaatttttaccctcttgtgagtttttttaaacaacatttttatgtattactttcataaataacaattatttaaaaataaactaaccaagattatagagaaaaactcctgagtttttcctaatacaatgctaatacaaatgctaatgccaatacaaaactctaacagagatgaaaatgataaacttttaattttatgaacttaatattgatgcaaatatatgtaaattaatttggtagttaagtagaagattgatatgattcgcccaaaaagtttattcctagaagacaaggatatcgctacattaggaaataaattcatacaattgaacatattaacaaatccattagggaaaaaagccacaatcatctgaatggacggaaaagtcaacattcttttctgattgataaaacctacaataaaagacaaatagaagtctatatttttaacatgataaaagtagttgaaacatatatcacaaaatttaactccttaatatataaagtgctcttacaaagcaacaagaaaaagatatacccagtagaaaaataatagtaggaggcaaatcaccaatcaagtatcctcaaaacattaaacaatgttcaattttattagtatttaaagaagtgtaaatataagctatgaaataactttaagctattagctattatattggcaatgattaaaatgctatactcagtattggtgagactgaaataaatgggctgtcttatctgactaggagaggtacatgttaataaaataattcaggaaggtaattttttaatatatttaaaaagtattaaaagtgcatttatcctttaatctagaaatttcacttctaggagttatagctaaagaaatcacttaagataaatgcttacaaaatttagcaacaggatgatccaaacattacattttataatggaaaaatagaaataaaccaaatgtctaacagtagaatagttatgtcaattacgataaatctgtataatactattcaaccatcaaaattaatgttgcacatgaatacttgttcatgtagaagatgtttaagatatattaagtgataaaagcaaggcttgaagtaatgtagcagtatgatcttatttttgtttaaattatctatctatctctctctatgtatcatctatctatctatttacctaccaacctacttacctacctgtctatctgaaaaagcctggaagaatattatgatgttaatgttaattacctctggttggtgttttttcatttttattattgtctattatgattatacatattattgtatattattgcatattatttttcttttcaaacataatatattacttttataagaaaataagtaaatgttattttaaggtaaagtaagtagatgtgatctcttgtgtaaagtatgaaaaaggcttaataggctttttacaagataaatcccataattcgattagaaaatgaacacagcagaaaaatgggctgtagacaattgccaaaataaaaactgttaatgacctaggaacaagaaacattcaacctgactagtaatttaaaaaataaaattaaaaagaggttctctttttctataaccaaagagacaaaagatttctaaaaaacagaaaattatctatgaaagcaaatgtttagggctatgagatctcttgtacaatgtagaagtggcagtaatatttctgcagaatatgaaaccacataacagaagtgttaatattgtacatgccatttggtccagacatttcctttctctgaattttcataaaaagaaatgtggacatgaacaaataaggatgttaattacagcattttttataatgataaaaattggaaaaaacctaaatgttcaaaaatacaagattgattagctaaattacagtatatgaataaaatagaatattattccaaaattgggtttttagaagaatatttaatgacgtggaacaggttcgtaatatactgtaaaatgaaaagaaagtgttctttttctgctctaccacgatagcagagaatatgtttttgggtgtcatgtgaaaaatactctggtatcttaccatgtttggtatttgatcactaaaaatgactgctggtgccttactgatatctgtcctggcacttggtaacagtgacactgtgagtgtctctcttttgtctacctttttgaatgtatatgatgattctaccatgaaaaaaaatcttatttaaaaaagtaaacaatattggtgaataatgcatctatactcctgtgattcagaacattagatcgagcacttagggaataagtcagtgatcttaacttgaaaatgtaattagaactcatgaaaaaataaacatgtcacctattagatgttatgattaacttaaattgataatgctgaaatatactttttttgctattcattaaaaagacttaggaagttaatagaataaaatatagatatagagtgtgcttgaaacgacatgcaaattacaaatcacttccacagagttactgaggttcagttattgcttctatcatgtacagaggctctacagtatagtggttgagaattcggcctcttttggtcaaaaagtaggctctgttgctgtgtgcactcgggccagttgcacaatctctctgtgactgttggaggctgagcttgcagtgagccaagatcgtgccactgcactccagcctgggcgacagagcgagactccgtctcaaaaacaaaacaaaacaaagcaaaactaaaatgtatataatgatagtaccaacattacagggatgttgtgaggtttaagttcatatatttaaaggcctcagaatacacatggtaagatttcaataaatgctagctgatattataatttttatgattactgttactctattttctgtcagcctgacttctatgtctgtcttttacaacaaaactttatcagcggagaaagcccgaagctgtctttgaattttgcagagcatacatgaaccatctaaaataagccatggatatctatgctcaagttctagacttgctggtggccctctccaacttttctgctttgttggcatcttgactttctgctttagacacacgctgcaactttattctttattcagtcatttggattacagtatcaattttggacttagactcatgatttttatctgaagcacttctttaggtctcagtcctaaatgctgacctcgctatttatgaaccagaactgtgactaaggaccgccttactgtcgttgtatcctacagaatctgttcaggtctgaaatgagaggaaggccagctaatagacagggtgggcaacggtagaggttgagtcattggctcttgggttgaagggaagaggatgtcagcaggaggattttaggaagtaaaactaatagaaaactgatgatgaaagagagggcaaagtctaggaaaatttctacatttttgtcttggttgcctggagacactatgaataagaaatggcaggtttcccaccaaagatgtcaagctgttacatgaggcagatttggggatttcaggcagagttttccagcagacagcgaaaatctactttcaagaattcacaccattcctccaatgccctaactaccaattagtctgaattaagataagctggtatagagtagactgttattttctcttccctgttcgttttcaggagaatttgggttcctgctatatcagaaataaactcagatcatgtatggacttagataaagatgtattgtgtgaggatccactgagaaaaaatctgaacccccaggaatctgagttccagagctgctgcttttttttttaaatcatgaaatacaacaaaatcagttaatatgtcatgcacaaagttgttaagcagaacgatattaattctacagccaactgaatttgtttctaaaaggaataaaatgtcagaatgcacagaaatatcagttttgaaataactcagagccacaagtgtatcttgtgaaatctcatattataaattatggtttaagagatttaaatagactctagtaataatattaataggtgagaatgttgaaatgtgtggcttcaaaggcaaatgcaggaaaaatagtaatactttgcaaaaggcatatacatatcaatctacaatggtatttaaaatgttattatttctgccagagtgtttattacatgaatgaaataaaagaaaaaaatagcttaataactaaaaaaggacagaagtcctggaaagaagaagaaataaagattaaagcaatggaaaagataccaatacaatttttaaaggaaaaggtaaatcagtaagatacaaaaacttgtttcaagaaaactggaggaataaaataagcagacttaattcatgacaaatgcacagaaaggaaaaaaggaggggcacaggacagaaaagggaactcagagttacaggcttgctgatttgctgtttcattccttagaaaccctctatcaataaaatgtaaccacaactctgcagaatacaaacaaatataaaattatgcattaaatgcaagaaagatttaataaaacactaagactcgtctttggggggagacagaatgagtggcttttccttctttttagttttctgtacttcacctaagtgtcttacatgacgattaagctactttcacaatggacaggaattaactcaattaaaaaatgaagctctgaatcccatttcatattaaaatttaatacagcagagctttactctgtgaccagctactttggaaactgaacaggatgacattcttccctgtgcagtgtgtattacaaaccttcatgaagaagaatagttgtctccattatctgacacatttcctagcctgtgtttccaatcactggctttcaatgggtccgtctaccacatgggttttgcactgtctttgctctccctgggaagcaaacaacacactactcatgtttactcttactctttcctatgtgggtcttgttgggcctctggtgtaggattcccctggctcacagagtctgagaggaaactgcagcattttatttgaacgtcttcaaccttagacactcacagttccctctgccctctcacacatgcgttccagaattcggtgaatactggtgaaactgggtctgtctgcaggcagcttgctccaacatagacgcatgagattgtacagctccacggggcagttctcagggcaggagaggatgttgccatctcgcacgtagtaaatgacctcctcatgggccatcccatagtagggctgcaggccataggagaagatctcccagaggaccacgccataggcccacacatcagactctgtagtgtagcggttataaaaaatggactctggtggcatccaacggatagggatagcgtcgttttcattagctttgtagtagtctgctgagtagatgttcctggagaggccaaagtcggcaattttcaccaccatgttctcgcccaccaggcagttcctggtggctaaatctcggtgaacaaacttacgttctgagaggtaagccatgccagctgccacctgcctggcaatgcaaagctgctcagcacaggagaggggtgggggcccagggctggagacctgagccctcatagacaagtcactgtgactgaggctgcacacggtgtgaggggacatgctgcggaggaactcattgaggtcaccataggccatgtattcaaagagcaggcacattggcttcccgacagcacacactcctaatagcttcacaatgttagggttgtcaaattctgccatgagggctgcctccctctgaaagtccgcttgcatatctgccgaggcttcttctttgagcatctttactgccaccatagtgaaaggttcatagggaagtaagcctggtgcccttgcttgaaacacccttccaaacgctccctctccgatgtctctcacatattcaatgttattccttggatactccaggctgagcaatttggggttcagaaggagcggcatcctctggtacatggggttgggatgaagtctatctagtaagagctcagaaggcagtgtggtgagggttactgctgctgattctcttttcttatttttccattgttttcttcttcggcagcaatagagagtagttatggtaagaagcacaaatattgcaaagctggacatgatggagattattacagtcatggagtatgtaggtgagacagagaaggaagaagaggaggaggaaggcagatttggaatgtccacacttggctttgaggacgtcattggtgggaatgtttttaggttttctttgttataatctagatgtggcagtctggcacaggccgtggggtcccaatgcatgctgggaagcttgctgcattctggcacggacagcaaatgcatctcggatctgtagagtcctctgtgggtcttctcttccattaccagccattcttttgcgcagaagagctcctttactgccaagcagtactctctgcaaatgggaataggagtaggcactactccaggactgcactcctggaagatgtggttacacaacaaagcctcagcagctggccggcagactgggctcactactttcagttcattccaggccgtgtggaccagtagctcttgggcctcctcagggtccgcataggaggtgttgagaaaaacaagagcatcttttgccaggactgcattacacacctcccctctgtactgggcgcagtagcctttgttatctttctgtggtttactccattctgctatgctgatggtggctgcagccttggcagtactgaacttctccccatgcttattggtagctatgcatgtgtagagtcctggcttggtgataaacagctgcagtcttgagtcaatcactcggtctttcacactctcttgaatggacccagaagaaacagcatttccgttttcaatccaggtgatggtggggacaggaatgcctgttgctgtacagtgcagggtcacaaaggagccaaaggtgacattgtgggattcaggagcccgcaggatcctggcaaaaacctcaacttccagcttcaccactttggaatatgctgtcccgaggctgttttttgccacacatcgatactgtcctgcatcttccttttgtacgttatgaatcctcaagctcccagattcaagaactgcaattcgggaattttccctgagagggctgtctccctttatccaagacactgatggtttgggattacccattgtagtacatggtaggactgcttttaatccctctattattttcacatttatgggaggacgagttattttaggtttcatcttcacttgcagggctccacaactctccacagctcctcccacaccattgttggccgtgcagcagtaaatgccatcatcactgtcttccacactcaggatggtgaggagctgcccattctcccggatgctgtaccgggtgtcaaagagtttaatgagaattttatttctagtccaggaaatctcaggctgggggtaggattccactgcacacatgaaagtagccacttcttcaactaaggcatccactgtttcaagaggagtggtgatgacaggagcttttggaagtttctcagttccgctgaaggcaaccagagtaagaatatgtaccagtggaatgttgacgagctctctcatgattaatccaggctcacgcaggacgaagttccttctggacaacgcaaggaaaatggctccacagtttacattttaaagcatactttgttgcaaaagggttgtctgctaatgact

SEQ ID NO: 313 - RNA, 3422 nt, Mus musculus
  source 1..3422: mol_type = mRNA
gcagacacaaacagtccttagcggacaactctattgtaacaaaccatgctttaaaatgtaaacccgggagcgtgttttttgttttttttttttttttttttttcctcacgttgtccagaagcaacctttcttcctgagcctggattaatcatgagagagcttgtcaacattccactgttacagatgctcaccctggttgccttcagcgggactgagaaacttccaaaagcccctgtcatcaccacgcctcttgaaactgtagatgccttggttgaagaagtagcgactttcatgtgtgccgtggaatcctaccctcagcccgagatttcttggaccagaaataaaattctcattaagctgtttgacacccgctacagcatccgggagaatggtcagctcctcaccattctgagcgtggaagacagtgatgatggcatctactgctgcatagccaacaatggagtgggaggagccgtggagagttgtggtgccctgcaagtgaagatgaaacctaaaataactcgtcctcccattaatgtaaaaataatagagggattgaaggcagttctgccgtgcactacgatgggtaaccccaaaccatctgtgtcctggatcaagggggacaatgctctcagggaaaattccagaatcgcagttcttgaatctgggagcttaaggatccataatgtgcaaaaggaagatgcaggacagtaccgctgtgtggccaaaaacagcctgggcacagcttactccaaactggtgaagctggaagtggaggaagacagagaacctgagcaggacgctaaagtttttgcaagaatcctgcgtgctcctgaatcccacaatgtcacctttggttcctttgtaaccctacgctgcacagcaataggcatccctgtccccaccatcagctggattgaaaacggaaatgctgtttcttcaggttccattcaagagagtgtgaaagaccgagtgattgactcaagactccagctcttcatcacaaagccaggactctacacatgcatagctaccaataagcacggagaaaagttcagtaccgcaaaggctgcagccactgtcagcatagcagtccctcctccgtggttttctatggatacttctttcctatggacagaatggagtaagtcacagaaagacagccaaggctactgtgcccagtacagaggggaggtgtgtgatgcagtcctggcgaaagatgctcttgtcttcttcaacacctcctaccgggaccccgaggacgcccaggagctgctgatccacactgcgtggaatgagctgaaggctgtgagtccactgtgccggccagctgctgaggctctgctgtgtaaccacctcttccaagagtgcagccctggagtggtacctactcccatgcccatttgcagagagtactgcctggcggtaaaggagctcttctgtgcaaaggaatggcaggcaatggaaggaaaggcccaccggggcctctacagatctgggatgcatctccttccggtaccagagtgcagcaagcttcccagcatgcaccgggaccccacagcctgcacaagactgccatatttagattataaaaaagaaaacataacaacattcccgtcaataacgtcctccaggccgagcgcggacattccaaacctgcctgcctccacctcttcctttgccgtctcgcctgcgtactccatgaccgtcatcatctccatcgtgtccagctttgccctgtttgctcttctcaccatcgctactctctattgctgccgaaggaggaaagaatggaaaaataagaaaagagagtcgaccgcggtgaccctcaccacgttgccttccgagctcctgctggataggctccatcccaaccccatgtaccagaggatgccactccttctgaatcctaagttgctcagcctggagtatccgaggaataacattgagtatgtccgagacatcggagagggggcgtttggaagagtcttccaagcaagggcccctggcttgctgccttatgaacctttcactatggtggccgtgaagatgcttaaggaagaggcctctgcagacatgcaagcggactttcagagggaggcggccctcatggcagagtttgacaaccccaacattgtgaaactcttaggtgtgtgtgccgttgggaagccgatgtgtctgctctttgaatatatggcctatggtgacctcaatgagttcctccgaagtatgtccccgcacactgtttgcagcctcagccacagtgacctgtccacgagggctcgggtgtctagccctggtcctccaccactgtcctgtgcagaacagctctgcattgccaggcaggtggcagctggcatggcctacctttcagagcgcaagtttgtccaccgggacttagctaccaggaactgcctggttggggagaccatggtggtgaaaattgcagactttggcctctccaggaacatctattccgcagactactacaaagctgatggaaatgacgccatccctatccgctggatgccgcccgagtctatcttctacaaccgctacaccactgagtcggatgtatgggcctatggtgtggtcctctgggagatcttctcctatgggctgcagccctactatggaatggcccacgaggaggtcatttactatgtgagagatggcaacatcctcgcctgccctgagaactgccccttggaactgtacaacctcatgcgcctgtgttggagcaagctgcctgctgatagacccagcttctgcagtatccacaggatcctgcagcgcatgtgcgagagagcagagggaacggtgggtgtctaaagttgaccattctcaaacaacacccaggaggctcttttcagactgtgagctggaggaaccctaccgcagaggccgtgtaagaccagataggaggagtttaactcagacatcacgtgccagttgattgtttgccaggagaaacagatggtgaatatcccacagggttaaagagtcacatcaaaataggttggagatacaggctaggaaagaggacagcaggtagctcctctccctcacagggaccgtttctaatatatattgcataataagaacatcccggttacgttcctacataatctctcagagcgagactgcagtgcttaggttgaatccaaaactggatgggcaacttcatttttaacagaagacatcctgcccattgcaaaagcaatgtgtctttgtgtatatttaggtaaaggactgaaaactaaagataggaatcccttcttccaccagtcaagacacgtggcagggtcttgctgttgtttagttcttccttgcacagaatatgtaacgttgtatttgcattctggaattgagtatctattttactgatagacttttgaagaataaaaagtggaaagcctgca

SEQ ID NO: 314 - RNA, 3422 nt, Mus musculus
  source 1..3422: mol_type = mRNA
tgcaggctttccactttttattcttcaaaagtctatcagtaaaatagatactcaattccagaatgcaaatacaacgttacatattctgtgcaaggaagaactaaacaacagcaagaccctgccacgtgtcttgactggtggaagaagggattcctatctttagttttcagtcctttacctaaatatacacaaagacacattgcttttgcaatgggcaggatgtcttctgttaaaaatgaagttgcccatccagttttggattcaacctaagcactgcagtctcgctctgagagattatgtaggaacgtaaccgggatgttcttattatgcaatatatattagaaacggtccctgtgagggagaggagctacctgctgtcctctttcctagcctgtatctccaacctattttgatgtgactctttaaccctgtgggatattcaccatctgtttctcctggcaaacaatcaactggcacgtgatgtctgagttaaactcctcctatctggtcttacacggcctctgcggtagggttcctccagctcacagtctgaaaagagcctcctgggtgttgtttgagaatggtcaactttagacacccaccgttccctctgctctctcgcacatgcgctgcaggatcctgtggatactgcagaagctgggtctatcagcaggcagcttgctccaacacaggcgcatgaggttgtacagttccaaggggcagttctcagggcaggcgaggatgttgccatctctcacatagtaaatgacctcctcgtgggccattccatagtagggctgcagcccataggagaagatctcccagaggaccacaccataggcccatacatccgactcagtggtgtagcggttgtagaagatagactcgggcggcatccagcggatagggatggcgtcatttccatcagctttgtagtagtctgcggaatagatgttcctggagaggccaaagtctgcaattttcaccaccatggtctccccaaccaggcagttcctggtagctaagtcccggtggacaaacttgcgctctgaaaggtaggccatgccagctgccacctgcctggcaatgcagagctgttctgcacaggacagtggtggaggaccagggctagacacccgagccctcgtggacaggtcactgtggctgaggctgcaaacagtgtgcggggacatacttcggaggaactcattgaggtcaccataggccatatattcaaagagcagacacatcggcttcccaacggcacacacacctaagagtttcacaatgttggggttgtcaaactctgccatgagggccgcctccctctgaaagtccgcttgcatgtctgcagaggcctcttccttaagcatcttcacggccaccatagtgaaaggttcataaggcagcaagccaggggcccttgcttggaagactcttccaaacgccccctctccgatgtctcggacatactcaatgttattcctcggatactccaggctgagcaacttaggattcagaaggagtggcatcctctggtacatggggttgggatggagcctatccagcaggagctcggaaggcaacgtggtgagggtcaccgcggtcgactctcttttcttatttttccattctttcctccttcggcagcaatagagagtagcgatggtgagaagagcaaacagggcaaagctggacacgatggagatgatgacggtcatggagtacgcaggcgagacggcaaaggaagaggtggaggcaggcaggtttggaatgtccgcgctcggcctggaggacgttattgacgggaatgttgttatgttttcttttttataatctaaatatggcagtcttgtgcaggctgtggggtcccggtgcatgctgggaagcttgctgcactctggtaccggaaggagatgcatcccagatctgtagaggccccggtgggcctttccttccattgcctgccattcctttgcacagaagagctcctttaccgccaggcagtactctctgcaaatgggcatgggagtaggtaccactccagggctgcactcttggaagaggtggttacacagcagagcctcagcagctggccggcacagtggactcacagccttcagctcattccacgcagtgtggatcagcagctcctgggcgtcctcggggtcccggtaggaggtgttgaagaagacaagagcatctttcgccaggactgcatcacacacctcccctctgtactgggcacagtagccttggctgtctttctgtgacttactccattctgtccataggaaagaagtatccatagaaaaccacggaggagggactgctatgctgacagtggctgcagcctttgcggtactgaacttttctccgtgcttattggtagctatgcatgtgtagagtcctggctttgtgatgaagagctggagtcttgagtcaatcactcggtctttcacactctcttgaatggaacctgaagaaacagcatttccgttttcaatccagctgatggtggggacagggatgcctattgctgtgcagcgtagggttacaaaggaaccaaaggtgacattgtgggattcaggagcacgcaggattcttgcaaaaactttagcgtcctgctcaggttctctgtcttcctccacttccagcttcaccagtttggagtaagctgtgcccaggctgtttttggccacacagcggtactgtcctgcatcttccttttgcacattatggatccttaagctcccagattcaagaactgcgattctggaattttccctgagagcattgtcccccttgatccaggacacagatggtttggggttacccatcgtagtgcacggcagaactgccttcaatccctctattatttttacattaatgggaggacgagttattttaggtttcatcttcacttgcagggcaccacaactctccacggctcctcccactccattgttggctatgcagcagtagatgccatcatcactgtcttccacgctcagaatggtgaggagctgaccattctcccggatgctgtagcgggtgtcaaacagcttaatgagaattttatttctggtccaagaaatctcgggctgagggtaggattccacggcacacatgaaagtcgctacttcttcaaccaaggcatctacagtttcaagaggcgtggtgatgacaggggcttttggaagtttctcagtcccgctgaaggcaaccagggtgagcatctgtaacagtggaatgttgacaagctctctcatgattaatccaggctcaggaagaaaggttgcttctggacaacgtgaggaaaaaaaaaaaaaaaaaaaaaacaaaaaacacgctcccgggtttacattttaaagcatggtttgttacaatagagttgtccgctaaggactgtttgtgtctgc

SEQ ID NO: 315 - RNA, 2855 nt, Rattus norvegicus
  source 1..2855: mol_type = mRNA
caaacagtcattagtggacgactctattgtaataaactgtgctttaaaatgtaaaccagggagcgtttttttcctcacattgtccagaagcaacctttcttcctgagcctggattaatcatgagagagctcgtcaacattccactgttacagatgctcaccctggttgccttcagcgggaccgagaaacttccaaaagcccctgtcatcaccacgcctcttgaaactgtagatgccttagttgaagaagtggcgactttcatgtgcgccgtggaatcctaccctcagcctgaaatttcttggaccagaaataaaattctcatcaagctgtttgacacccgctacagcatccgagagaacggtcagctcctcaccatcctgagtgtggaggacagtgatgatggcatctactgctgcacagccaacaatggagtgggaggagcggtggaaagttgtggcgccctgcaagtgaagatgaagcctaaaataactcgtcctcccatcaatgtaaaaataattgagggattgaaagcagtcctaccgtgcactacgatgggtaaccccaagccatccgtgtcctggattaagggggacagtgctctcagggaaaattccaggattgcagttcttgaatctgggagtttaaggatccataatgtgcaaaaggaagacgcaggacagtaccgatgtgtggcaaaaaacagcctgggcacagcttactccaaactggtgaagctggaagtggaggtttttgcaagaatcctgcgtgctcctgaatcccacaatgtcacctttggttcctttgtaaccctacgctgcacagcaataggcatgcctgtccccaccatcagctggattgaaaacggaaatgctgtttcttcaggttccattcaagagaatgtgaaagaccgagtgattgactcaagactccagctctttatcacaaagccaggactctacacatgcatagctaccaataagcatggagagaaattcagtaccgcaaaggctgcagccactgtcagtatagcagaatggagcaaatcacagaaagaaagcaaaggctactgtgcccagtacagaggggaggtgtgtgatgccgtcctggtgaaagactctcttgtcttcttcaacacctcctatcccgaccctgaggaggcccaagagctgctgatccacactgcgtggaatgaactcaaggctgtgagcccactctgccgaccagctgccgaggctctgctgtgtaatcacctcttccaggagtgcagctctggagtgctacctactcctatgcccatttgcagagagtactgcttggcagtaaaggagctcttctgtgcaaaggaatggctggcaatggaagggaagacccaccgcggactctacagatccgggatgcatttcctcccggtcccggagtgcagcaagcttcccagcatgcaccaggaccccacagcctgcacaagactgccgtatttagattataaaaaagaaaacataacaacattcccgtccataacgtcctccaagccgagcgtggacattccaaacctgcctgcctccacgtcttccttcgccgtctcgcctgcgtactccatgactgtcatcatctccatcatgtcctgctttgcggtgtttgctctcctcaccatcactactctctattgctgccgaaggaggagagagtggaaaaataagaaaagagagtcggcagcggtgaccctcaccacattgccttccgagctcctgctggacaggctgcatcccaaccccatgtaccagaggatgccactccttctgaatcccaagttgctcagcctggagtatccgaggaataacatcgagtatgtcagagacatcggagagggagcgtttggaagggtctttcaagcgagggccccaggcttgcttccttatgaacccttcactatggtggctgtgaagatgctgaaggaggaggcctccgcagatatgcaggcagactttcagagggaggcagccctcatggcggagtttgacaaccccaacattgtgaagctcttaggtgtgtgtgctgttgggaagccaatgtgcctgctctttgaatatatggcctatggtgacctcaatgagttcctccgaagcatgtcccctcacactgtgtgcagcctcagccacagtgacctgtccacgagggctcgggtgtccagccctggtcctccacccctgtcttgtgcggaacagctctgtattgccaggcaagtggcagctggcatggcctacctgtcggagcgcaagtttgtccatcgggacttagctaccaggaactgcctggttggagagaacatggtggtgaaaattgcagactttggcctctctaggaacatctactccgcagactactacaaagctgatggaaacgatgctatacctatccgctggatgccacccgagtctatcttctacaaccgctacaccacggagtcagatgtgtgggcttatggcgtggtcctctgggagatcttctcctatggactgcagccctactatggaatggcccatgaggaggtcatttactatgtgagagatggtaacatccttgcctgccctgagaactgtcccttggaactgtacaaccttatgcgcctatgttggagcaagctgcctgcagacagacccagcttctgcagtatccaccggatcctgcagcgcatgtgcgagagagcagagggaacggtaggcgtctaaggttgaccgtgctcaaacaacacccaggaggatcttttcagactgcgagctggagggatcctaaagcagaggccggataagaccagataggaagagtttaactcaggcagcacgtgccagttgattgtt

SEQ ID NO: 316 - RNA, 2855 nt, Rattus norvegicus
  source 1..2855: mol_type = mRNA
aacaatcaactggcacgtgctgcctgagttaaactcttcctatctggtcttatccggcctctgctttaggatccctccagctcgcagtctgaaaagatcctcctgggtgttgtttgagcacggtcaaccttagacgcctaccgttccctctgctctctcgcacatgcgctgcaggatccggtggatactgcagaagctgggtctgtctgcaggcagcttgctccaacataggcgcataaggttgtacagttccaagggacagttctcagggcaggcaaggatgttaccatctctcacatagtaaatgacctcctcatgggccattccatagtagggctgcagtccataggagaagatctcccagaggaccacgccataagcccacacatctgactccgtggtgtagcggttgtagaagatagactcgggtggcatccagcggataggtatagcatcgtttccatcagctttgtagtagtctgcggagtagatgttcctagagaggccaaagtctgcaattttcaccaccatgttctctccaaccaggcagttcctggtagctaagtcccgatggacaaacttgcgctccgacaggtaggccatgccagctgccacttgcctggcaatacagagctgttccgcacaagacaggggtggaggaccagggctggacacccgagccctcgtggacaggtcactgtggctgaggctgcacacagtgtgaggggacatgcttcggaggaactcattgaggtcaccataggccatatattcaaagagcaggcacattggcttcccaacagcacacacacctaagagcttcacaatgttggggttgtcaaactccgccatgagggctgcctccctctgaaagtctgcctgcatatctgcggaggcctcctccttcagcatcttcacagccaccatagtgaagggttcataaggaagcaagcctggggccctcgcttgaaagacccttccaaacgctccctctccgatgtctctgacatactcgatgttattcctcggatactccaggctgagcaacttgggattcagaaggagtggcatcctctggtacatggggttgggatgcagcctgtccagcaggagctcggaaggcaatgtggtgagggtcaccgctgccgactctcttttcttatttttccactctctcctccttcggcagcaatagagagtagtgatggtgaggagagcaaacaccgcaaagcaggacatgatggagatgatgacagtcatggagtacgcaggcgagacggcgaaggaagacgtggaggcaggcaggtttggaatgtccacgctcggcttggaggacgttatggacgggaatgttgttatgttttcttttttataatctaaatacggcagtcttgtgcaggctgtggggtcctggtgcatgctgggaagcttgctgcactccgggaccgggaggaaatgcatcccggatctgtagagtccgcggtgggtcttcccttccattgccagccattcctttgcacagaagagctcctttactgccaagcagtactctctgcaaatgggcataggagtaggtagcactccagagctgcactcctggaagaggtgattacacagcagagcctcggcagctggtcggcagagtgggctcacagccttgagttcattccacgcagtgtggatcagcagctcttgggcctcctcagggtcgggataggaggtgttgaagaagacaagagagtctttcaccaggacggcatcacacacctcccctctgtactgggcacagtagcctttgctttctttctgtgatttgctccattctgctatactgacagtggctgcagcctttgcggtactgaatttctctccatgcttattggtagctatgcatgtgtagagtcctggctttgtgataaagagctggagtcttgagtcaatcactcggtctttcacattctcttgaatggaacctgaagaaacagcatttccgttttcaatccagctgatggtggggacaggcatgcctattgctgtgcagcgtagggttacaaaggaaccaaaggtgacattgtgggattcaggagcacgcaggattcttgcaaaaacctccacttccagcttcaccagtttggagtaagctgtgcccaggctgttttttgccacacatcggtactgtcctgcgtcttccttttgcacattatggatccttaaactcccagattcaagaactgcaatcctggaattttccctgagagcactgtcccccttaatccaggacacggatggcttggggttacccatcgtagtgcacggtaggactgctttcaatccctcaattatttttacattgatgggaggacgagttattttaggcttcatcttcacttgcagggcgccacaactttccaccgctcctcccactccattgttggctgtgcagcagtagatgccatcatcactgtcctccacactcaggatggtgaggagctgaccgttctctcggatgctgtagcgggtgtcaaacagcttgatgagaattttatttctggtccaagaaatttcaggctgagggtaggattccacggcgcacatgaaagtcgccacttcttcaactaaggcatctacagtttcaagaggcgtggtgatgacaggggcttttggaagtttctcggtcccgctgaaggcaaccagggtgagcatctgtaacagtggaatgttgacgagctctctcatgattaatccaggctcaggaagaaaggttgcttctggacaatgtgaggaaaaaaacgctccctggtttacattttaaagcacagtttattacaatagagtcgtccactaatgactgtttg

SEQ ID NO: 317 - RNA, 3975 nt, Macaca fascicularis
  source 1..3975: mol_type = mRNA
gatagagaatggttaagacccaagacagagagaagttacaaggactatttggttgataaaatctgtaggaattggaatgggctgaatgtgggagtgggggtggggtgagagatggggaggagtgaggactaaataaacccagatttctggtttgagtccaggagagtgggctgctgaatccaaaggccaggacacctatacctctgggaatacagtgatggttgcaaaaggcatctggtattgtccttctgccactgtcttaaaagggattctaaaaggattttcttgcccttgttcctctagccctacacttgcgttactggcctacgtggatactcaccagctggctgtgtccatcattgcagccaagtctgagaattcctgattatacttagagcctgtggagctgctgacacaaacagtcattagcagacgacccttttgcaacaaagtatgctttaaaatgtaaaccgtggaggcattttccttgcgttgtccagaaggaactttgtcctgcgtgagcctggattaatcatgagagagctcgtcaacattccactggtacatattcttactctggttgccttcagcggaactgagaaacttccaaaagctcctgtcatcaccactcctcttgaaactgtggatgccttagttgaagaagtggctactttcatgtgtgcagtggaatcctacccccagcctgagatttcctggaccagaaataaaattctcattaagctctttgacacccggtacagcatccgggagaatggtcagctcctcaccatcctgagtgtggaagacagtgatgatggcatttactgctgcacggccaacaatggtgtgggaggagctgtggagagttgtggagccctgcaagtgaagatgaaacctaaaataactcgtcctcccataaatgtgaaaataatagagggattaaaagcagtcctaccatgtactacaatgggtaatcccaaaccatcagtgtcttggataaagggagacagccctctcagggaaaattcccgaactgcagttcttgaatctgggagcttgaggattcataacgtacaaaaggaagatgcaggacagtatcgatgtgtggcaaaaaacagccttgggacagcatattcaaaagtggtgaagctggaagttgaggtttttgccaggatcctgcgggctcctgaatcccacaatgtcacctttggctcctttgtgaccctgcactgtacagcaacaggcattcctgtccccaccatcacctggattgaaaacggaaatgctgtttcttctgggtccattcaagagagtgtaaaagaccgagtgattgactcaagactgcagctgtttatcaccaagccaggactctacacatgcatagctaccaataagcatggggagaagttcagtactgccaaggctgcagccactatcagcatagcagaatggagtaaaccacagaaagataacaaaggctactgcgcccagtatagaggggaggtgtgtaatgcagtcctggcaaaagacgctcttgtttttctcaacacctcctatgcggaccctgaggaggcccaagagctgctggtccacacggcctggaatgaactgaaagtagtgagcccactctgcaggccagctgctgaggctttgttgtgtaaccacgtcttccaggagtgcagtcctggagtagtgccgactcctattcccatttgcagagagtactgtttggcagtaaaggagctcttctgtgcaaaagaatggctggcaatggaagagaagacccacagaggactctacagatctgagatgcatttgctgtcggtgccagaatgcagcaagcttcccagcatgcactgggaccctacagcctgtgccagactgccacatttagattataacaaagaaaacccaaaaacattcccaccaatgacatcctcaaagccaagtgtggacattccaaatttgccttcctcctcctcttcttccttctctgtctcacctacatactccatgactgtaataatctccatcatgtccagctttgcaatatttgcgcttcttaccatcactactctctattgctgccgaagaagaaaacaatggaaaaataagaaaagagaatcagcagcagtaaccctcaccacactgccttctgagctcttactagatagacttcatcccaaccccatgtaccagaggatgccgctccttctgaaccccaaattgctcagcctggagtatccaagaaataacattgaatatgtgagagacattggagagggagcgtttggaagggtgtttcaagcaagggcaccaggtttacttccctatgaacctttcactatggtggcagtaaagatgctcaaagaagaagcctcggcagatatgcaagcggactttcagagggaggcagccctcatggcagaatttgacaaccctaacattgtgaagctcttaggcgtgtgtgctgtcgggaagccaatgtgcctgctctttgaatacatggcctatggtgatctcaatgagttcctccgcagcatgtcccctcacaccgtgtgcagcctcagtcacagtgacttgtctatgagggcccaggtctccagccctggacccccacccctctcctgtgctgagcagctttgcattgccaggcaagtggcagctggtatggcttacctctcagaacgtaagtttgttcaccgagatttagccaccaggaactgcctggtgggcgagaacatggtggtaaaaattgccgactttggcctctccaggaacatctactcagcagactactacaaagctaatgaaaacgacgctatccctatccgttggatgccaccagagtccattttttataaccgctacactacagagtctgatgtgtgggcctacggcgtggtcctctgggagatcttctcctatggcctgcagccctactatgggatggcccatgaggaggtcatttactacgtgcgagatggcaacatcctctcctgccctgagaactgccccgtggagctgtacaatctcatgcgtctatgttggagcaagctgcctgcagacagacccagtttcaccagtattcaccgaattctggaacgcatgtgtgagagggcagagggaactgtgagtgtctaaggttgaagacgttcaaataaaatgctgcagtttcctctcagactctgtgagccaggggaatcctacaccagaggcccgacaagacccacataggaaagagtaagagtagacatgagtagcatgttttttcccagggagagcaaagacagtgcaaaacccatgtggtagacggacctgttgaaggccagtgattggaaacacaggctaggtaatgtgtcagataatggagacaactatttttctttatgaaggtttgtaatatacactgcacagggaagaaggtcatcttgttcagtttccaaattagctggtcacagagtaaagctctcctgtattaaattttaatatgaaatgggattcagagcttcattttttaatcgagttaattcctgtccattgtgaaaatagcttaatcttcatgtaagacacttaggtgaagtacagaaaactaaaaagaaggaaaagccactcattttctctccacccaaagatgagtctcagtgttttgttaaatctttcttgcatttaatgcataattttatatttgtttgtattctgcggagttgtggttatattttattgatagagggtttctaaggaatgaaacagcaaatcagcaaggctgtgactttgagttcacttttctgtcctgtgtccctccttttttcctttctgtgcacttgtcataaattaaatctgcttattttattcctccagtttccttgaaacaagtttttgtatcttactgatttaccttttcctttaaaaattgtattggtgtcttttccattgctttaatctttatttcttcttctttccagaacttctgtc

SEQ ID NO: 318 - RNA, 3975 nt, Macaca fascicularis
  source 1..3975: mol_type = mRNA
gacagaagttctggaaagaagaagaaataaagattaaagcaatggaaaagacaccaatacaatttttaaaggaaaaggtaaatcagtaagatacaaaaacttgtttcaaggaaactggaggaataaaataagcagatttaatttatgacaagtgcacagaaaggaaaaaaggagggacacaggacagaaaagtgaactcaaagtcacagccttgctgatttgctgtttcattccttagaaaccctctatcaataaaatataaccacaactccgcagaatacaaacaaatataaaattatgcattaaatgcaagaaagatttaacaaaacactgagactcatctttgggtggagagaaaatgagtggcttttccttctttttagttttctgtacttcacctaagtgtcttacatgaagattaagctattttcacaatggacaggaattaactcgattaaaaaatgaagctctgaatcccatttcatattaaaatttaatacaggagagctttactctgtgaccagctaatttggaaactgaacaagatgaccttcttccctgtgcagtgtatattacaaaccttcataaagaaaaatagttgtctccattatctgacacattacctagcctgtgtttccaatcactggccttcaacaggtccgtctaccacatgggttttgcactgtctttgctctccctgggaaaaaacatgctactcatgtctactcttactctttcctatgtgggtcttgtcgggcctctggtgtaggattcccctggctcacagagtctgagaggaaactgcagcattttatttgaacgtcttcaaccttagacactcacagttccctctgccctctcacacatgcgttccagaattcggtgaatactggtgaaactgggtctgtctgcaggcagcttgctccaacatagacgcatgagattgtacagctccacggggcagttctcagggcaggagaggatgttgccatctcgcacgtagtaaatgacctcctcatgggccatcccatagtagggctgcaggccataggagaagatctcccagaggaccacgccgtaggcccacacatcagactctgtagtgtagcggttataaaaaatggactctggtggcatccaacggatagggatagcgtcgttttcattagctttgtagtagtctgctgagtagatgttcctggagaggccaaagtcggcaatttttaccaccatgttctcgcccaccaggcagttcctggtggctaaatctcggtgaacaaacttacgttctgagaggtaagccataccagctgccacttgcctggcaatgcaaagctgctcagcacaggagaggggtgggggtccagggctggagacctgggccctcatagacaagtcactgtgactgaggctgcacacggtgtgaggggacatgctgcggaggaactcattgagatcaccataggccatgtattcaaagagcaggcacattggcttcccgacagcacacacgcctaagagcttcacaatgttagggttgtcaaattctgccatgagggctgcctccctctgaaagtccgcttgcatatctgccgaggcttcttctttgagcatctttactgccaccatagtgaaaggttcatagggaagtaaacctggtgcccttgcttgaaacacccttccaaacgctccctctccaatgtctctcacatattcaatgttatttcttggatactccaggctgagcaatttggggttcagaaggagcggcatcctctggtacatggggttgggatgaagtctatctagtaagagctcagaaggcagtgtggtgagggttactgctgctgattctcttttcttatttttccattgttttcttcttcggcagcaatagagagtagtgatggtaagaagcgcaaatattgcaaagctggacatgatggagattattacagtcatggagtatgtaggtgagacagagaaggaagaagaggaggaggaaggcaaatttggaatgtccacacttggctttgaggatgtcattggtgggaatgtttttgggttttctttgttataatctaaatgtggcagtctggcacaggctgtagggtcccagtgcatgctgggaagcttgctgcattctggcaccgacagcaaatgcatctcagatctgtagagtcctctgtgggtcttctcttccattgccagccattcttttgcacagaagagctcctttactgccaaacagtactctctgcaaatgggaataggagtcggcactactccaggactgcactcctggaagacgtggttacacaacaaagcctcagcagctggcctgcagagtgggctcactactttcagttcattccaggccgtgtggaccagcagctcttgggcctcctcagggtccgcataggaggtgttgagaaaaacaagagcgtcttttgccaggactgcattacacacctcccctctatactgggcgcagtagcctttgttatctttctgtggtttactccattctgctatgctgatagtggctgcagccttggcagtactgaacttctccccatgcttattggtagctatgcatgtgtagagtcctggcttggtgataaacagctgcagtcttgagtcaatcactcggtcttttacactctcttgaatggacccagaagaaacagcatttccgttttcaatccaggtgatggtggggacaggaatgcctgttgctgtacagtgcagggtcacaaaggagccaaaggtgacattgtgggattcaggagcccgcaggatcctggcaaaaacctcaacttccagcttcaccacttttgaatatgctgtcccaaggctgttttttgccacacatcgatactgtcctgcatcttccttttgtacgttatgaatcctcaagctcccagattcaagaactgcagttcgggaattttccctgagagggctgtctccctttatccaagacactgatggtttgggattacccattgtagtacatggtaggactgcttttaatccctctattattttcacatttatgggaggacgagttattttaggtttcatcttcacttgcagggctccacaactctccacagctcctcccacaccattgttggccgtgcagcagtaaatgccatcatcactgtcttccacactcaggatggtgaggagctgaccattctcccggatgctgtaccgggtgtcaaagagcttaatgagaattttatttctggtccaggaaatctcaggctgggggtaggattccactgcacacatgaaagtagccacttcttcaactaaggcatccacagtttcaagaggagtggtgatgacaggagcttttggaagtttctcagttccgctgaaggcaaccagagtaagaatatgtaccagtggaatgttgacgagctctctcatgattaatccaggctcacgcaggacaaagttccttctggacaacgcaaggaaaatgcctccacggtttacattttaaagcatactttgttgcaaaagggtcgtctgctaatgactgtttgtgtcagcagctccacaggctctaagtataatcaggaattctcagacttggctgcaatgatggacacagccagctggtgagtatccacgtaggccagtaacgcaagtgtagggctagaggaacaagggcaagaaaatccttttagaatcccttttaagacagtggcagaaggacaataccagatgccttttgcaaccatcactgtattcccagaggtataggtgtcctggcctttggattcagcagcccactctcctggactcaaaccagaaatctgggtttatttagtcctcactcctccccatctctcaccccacccccactcccacattcagcccattccaattcctacagattttatcaaccaaatagtccttgtaacttctctctgtcttgggtcttaaccattctctatc

SEQ ID NO: 319 - RNA, 3687 nt, Macaca mulatta
  source 1..3687: mol_type = mRNA
ctcaccagctggctgtgtccatcattgcagccaagtctgagaattcctgattatacttagagcctgtggagctgctgacacaaacagtcattagcagacgacccttttgcaacaaagtatgctttaaaatgtaaaccgtggaggcattttccttgcgttgtccagaaggaactttgtcctgcgtgagcctggattaatcatgagagagctcgtcaacattccactggtacatattcttactctggttgccttcagcggaactgagaaacttccaaaagctcctgtcatcaccactcctcttgaaactgtggatgccttagttgaagaagtggctactttcatgtgtgcagtggaatcctacccccagcctgagatttcctggaccagaaataaaattctcattaagctctttgacacccggtacagcatccgggagaatggtcagctcctcaccatcctgagtgtggaagacagtgatgatggcatttactgctgcacggccaacaatggtgtgggaggagctgtggagagttgtggagccctgcaagtgaagatgaaacctaaaataactcgtcctcccataaatgtgaaaataatagagggattaaaagcagtcctaccatgtactacaatgggtaatcccaaaccatcagtgtcttggataaagggagacagccctctcagggaaaattcccgaactgcagttcttgaatctgggagcttgaggattcataacgtacaaaaggaagatgcaggacagtatcgatgtgtggcaaaaaacagccttgggacagcatattcaaaagtggtgaagctggaagttgaggaagaaagtgaacctgaacaagatactaaagtttttgccaggatcctgcgggctcctgaatcccacaatgtcacctttggctcctttgtgaccctgcactgtacagcaacaggcattcctgtccccaccatcacctggattgaaaacggaaatgctgtttcttctgggtccattcaagagagtgtaaaagaccgagtaattgactcaagactgcagctgtttatcaccaagccaggactctacacatgcatagctaccaataagcatggggagaagttcagtactgccaaggctgcagccactgtcagcatagcagaatggagtaaaccacagaaagataacaaaggctactgcgcccagtatagaggggaggtgtgtaatgcagtcctggcaaaagacgctcttgtttttctcaacacctcctatgcggaccctgaggaggcccaagagctgctggtccacacggcctggaatgaactgaaagtagtgagcccactctgcaggccagctgctgaggctttgttgtgtaaccacgtcttccaggagtgcagtcctggagtagtgccgactcctattcccatttgcagagagtactgcttggcagtaaaggagctcttctgtgcaaaagagtggctggcaatggaagagaagacccacagaggactctacagatctgagatgcatttgctgtcggtgccagaatgcagcaagcttcccagcatgcactgggaccctacagcctgtgccagactgccacatttagattataacaaagaaaacccaaaaacattcccaccaatgacatcctcaaagccaagtgtggacattccaaatttgccttcctcctcctcttcttccttctctgtctcacctacatactccatgactgtaataatctccatcatgtccagctttgcaatatttgcgcttcttaccatcactactctctattgctgccgaagaagaaaacaatggaaaaataagaaaagagaatcagcagcagtaaccctcaccacactgccttctgagctcttactagatagacttcatcccaaccccatgtaccagaggatgccgctccttctgaaccccaaattgctcagcctggagtatccaagaaataacattgaatatgtgagagacattggagagggagcgtttggaagggtgtttcaagcaagggcaccaggtttacttccctatgaacctttcactatggtggcagtaaagatgctcaaagaagaagcctcggcagatatgcaagcggactttcagagggaggcagccctcatggcagaatttgacaaccctaacattgtgaagctcttaggcgtgtgtgctgtcgggaagccaatgtgcctgctctttgaatacatggcctatggtgatctcaatgagttcctccgcagcatgtcccctcacaccgtgtgcagcctcagtcacagtgacttgtctatgagggcccaggtctccagccctggacccccacccctctcctgtgctgagcagctttgcattgccaggcaagtggcagctggtatggcttacctctcagaacgtaagtttgttcaccgagatttagccaccaggaactgcctggtgggcgagaacatggtggtaaaaattgccgactttggcctctccaggaacatctactcagcagactactacaaagctaatgaaaacgacgctatccctatccgttggatgccaccagagtccattttttataaccgctacactacagagtctgatgtgtgggcctacggcgtggtcctctgggagatcttctcctatggcctgcagccctactatgggatggcccatgaggaggtcatttactacgtgcgagatggcaacatcctctcctgccctgagaactgccctgtggagctgtacaatctcatgcgtctatgttggagcaagctgcctgcagacagacccagtttcaccagtattcaccgaattctggaacgcatgtgtgagagggcagagggaactgtgagtgtctaaggttgaagacgttcaaataaaatgctgcagtttcctctcagactctgtgagccaggggaatcctacaccagaggcccgacaagacccacataggaaagagtaagagtagacatgagtagcatgttttttcccagggagagcaaagacagtgcaaaacccatgtggtagacggacctgttgaaggccagtgattggaaacacaggctaggtaatgtgtcagataatggagacaactatttttctttatgaaggtttgtaatatacactgcacagggaagaaggtcatcttgttcagtttccaaattagctggtcacagagtaaagctctcctgtattaaattttaatatgaaatgggattcagagcttcattttttaatcgagttaattcctgtccattgtgaaaatagcttaatcttcatgtaagacacttaggtgaagtacagaaaactaaaaagaaggaaaagccactcattttctctccacccaaagatgagtctcagtgttttgttaaatctttcttgcatttaatgcataattttatatttgtttgtattctgcggagttgtggttatattttattgatagagggtttctaaggaatgaaacagcaaatcagcaaggctgtgactttgagttcacttttctgtcctgtgtccctccttttttcctttctgtgcacttgtcataaattaaatctgcttattttattcctccagtttccttgaaacaagtttttgtatcttactgatttaccttttcctttaaaaattgtattggtgtcttttccattgctttaatctttatttcttcttctttccagaacttctgtccttttttagttatttag

SEQ ID NO: 320 - RNA, 3687 nt, Macaca mulatta
  source 1..3687: mol_type = mRNA
ctaaataactaaaaaaggacagaagttctggaaagaagaagaaataaagattaaagcaatggaaaagacaccaatacaatttttaaaggaaaaggtaaatcagtaagatacaaaaacttgtttcaaggaaactggaggaataaaataagcagatttaatttatgacaagtgcacagaaaggaaaaaaggagggacacaggacagaaaagtgaactcaaagtcacagccttgctgatttgctgtttcattccttagaaaccctctatcaataaaatataaccacaactccgcagaatacaaacaaatataaaattatgcattaaatgcaagaaagatttaacaaaacactgagactcatctttgggtggagagaaaatgagtggcttttccttctttttagttttctgtacttcacctaagtgtcttacatgaagattaagctattttcacaatggacaggaattaactcgattaaaaaatgaagctctgaatcccatttcatattaaaatttaatacaggagagctttactctgtgaccagctaatttggaaactgaacaagatgaccttcttccctgtgcagtgtatattacaaaccttcataaagaaaaatagttgtctccattatctgacacattacctagcctgtgtttccaatcactggccttcaacaggtccgtctaccacatgggttttgcactgtctttgctctccctgggaaaaaacatgctactcatgtctactcttactctttcctatgtgggtcttgtcgggcctctggtgtaggattcccctggctcacagagtctgagaggaaactgcagcattttatttgaacgtcttcaaccttagacactcacagttccctctgccctctcacacatgcgttccagaattcggtgaatactggtgaaactgggtctgtctgcaggcagcttgctccaacatagacgcatgagattgtacagctccacagggcagttctcagggcaggagaggatgttgccatctcgcacgtagtaaatgacctcctcatgggccatcccatagtagggctgcaggccataggagaagatctcccagaggaccacgccgtaggcccacacatcagactctgtagtgtagcggttataaaaaatggactctggtggcatccaacggatagggatagcgtcgttttcattagctttgtagtagtctgctgagtagatgttcctggagaggccaaagtcggcaatttttaccaccatgttctcgcccaccaggcagttcctggtggctaaatctcggtgaacaaacttacgttctgagaggtaagccataccagctgccacttgcctggcaatgcaaagctgctcagcacaggagaggggtgggggtccagggctggagacctgggccctcatagacaagtcactgtgactgaggctgcacacggtgtgaggggacatgctgcggaggaactcattgagatcaccataggccatgtattcaaagagcaggcacattggcttcccgacagcacacacgcctaagagcttcacaatgttagggttgtcaaattctgccatgagggctgcctccctctgaaagtccgcttgcatatctgccgaggcttcttctttgagcatctttactgccaccatagtgaaaggttcatagggaagtaaacctggtgcccttgcttgaaacacccttccaaacgctccctctccaatgtctctcacatattcaatgttatttcttggatactccaggctgagcaatttggggttcagaaggagcggcatcctctggtacatggggttgggatgaagtctatctagtaagagctcagaaggcagtgtggtgagggttactgctgctgattctcttttcttatttttccattgttttcttcttcggcagcaatagagagtagtgatggtaagaagcgcaaatattgcaaagctggacatgatggagattattacagtcatggagtatgtaggtgagacagagaaggaagaagaggaggaggaaggcaaatttggaatgtccacacttggctttgaggatgtcattggtgggaatgtttttgggttttctttgttataatctaaatgtggcagtctggcacaggctgtagggtcccagtgcatgctgggaagcttgctgcattctggcaccgacagcaaatgcatctcagatctgtagagtcctctgtgggtcttctcttccattgccagccactcttttgcacagaagagctcctttactgccaagcagtactctctgcaaatgggaataggagtcggcactactccaggactgcactcctggaagacgtggttacacaacaaagcctcagcagctggcctgcagagtgggctcactactttcagttcattccaggccgtgtggaccagcagctcttgggcctcctcagggtccgcataggaggtgttgagaaaaacaagagcgtcttttgccaggactgcattacacacctcccctctatactgggcgcagtagcctttgttatctttctgtggtttactccattctgctatgctgacagtggctgcagccttggcagtactgaacttctccccatgcttattggtagctatgcatgtgtagagtcctggcttggtgataaacagctgcagtcttgagtcaattactcggtcttttacactctcttgaatggacccagaagaaacagcatttccgttttcaatccaggtgatggtggggacaggaatgcctgttgctgtacagtgcagggtcacaaaggagccaaaggtgacattgtgggattcaggagcccgcaggatcctggcaaaaactttagtatcttgttcaggttcactttcttcctcaacttccagcttcaccacttttgaatatgctgtcccaaggctgttttttgccacacatcgatactgtcctgcatcttccttttgtacgttatgaatcctcaagctcccagattcaagaactgcagttcgggaattttccctgagagggctgtctccctttatccaagacactgatggtttgggattacccattgtagtacatggtaggactgcttttaatccctctattattttcacatttatgggaggacgagttattttaggtttcatcttcacttgcagggctccacaactctccacagctcctcccacaccattgttggccgtgcagcagtaaatgccatcatcactgtcttccacactcaggatggtgaggagctgaccattctcccggatgctgtaccgggtgtcaaagagcttaatgagaattttatttctggtccaggaaatctcaggctgggggtaggattccactgcacacatgaaagtagccacttcttcaactaaggcatccacagtttcaagaggagtggtgatgacaggagcttttggaagtttctcagttccgctgaaggcaaccagagtaagaatatgtaccagtggaatgttgacgagctctctcatgattaatccaggctcacgcaggacaaagttccttctggacaacgcaaggaaaatgcctccacggtttacattttaaagcatactttgttgcaaaagggtcgtctgctaatgactgtttgtgtcagcagctccacaggctctaagtataatcaggaattctcagacttggctgcaatgatggacacagccagctggtgag

SEQ ID NO: 321 - RNA, 1622 nt, Homo sapiens
  source 1..1622: mol_type = mRNA
gttcccagggtggcgcctgctctccatccaggccccattccggctcccacccgacgctgcttttgttcccacgtttcggggggcagctggcactgtgattcctgccccatgagtgcctagaggcacggagccaccagggatcaccccacgtgggacacagggcttggggaggatggggcaggaccagaccaagcagcagatcgagaaggggctccagctgtaccagtccaaccagacagagaaggcattgcaggtgtggacaaaggtgctggagaagagctcggacctcatggggcgcttccgcgtgctgggctgcctggtcacagcccactcggagatgggccgctacaaggagatgctgaagttcgctgtggtccagatcgacacggcccgggagctggaggatgccgacttcctcctggagagctacctgaacctggcacgcagcaacgagaagctgtgcgagtttcacaagaccatctcctactgcaagacctgccttgggctgcctggtaccagggcaggtgcccagctcggaggccaggtcagcctgagcatgggcaatgccttcctgggcctcagcgtcttccagaaggccctggagagcttcgagaaggccctgcgctatgcccacaacaatgatgacgccatgctcgagtgccgcgtgtgctgcagcctgggcagcttctatgcccaggtcaaggactacgagaaagccctgttcttcccctgcaaggcggcagagcttgtcaacaactatggcaaaggctggagcctgaagtaccgggccatgagccagtaccacatggccgtggcctatcgcctgctgggccgcctgggcagtgccatggagtgttgtgaggagtctatgaagatcgcgctgcagcacggggaccggccactgcaggcgctctgcctgctctgcttcgctgacatccaccggagccgtggggacctggagacagccttccccaggtacgactccgccatgagcatcatgaccgagatcggaaaccgcctggggcaggtgcaggcgctgctgggtgtggccaagtgctgggtggccaggaaggcgctggacaaggctctggatgccatcgagagagcccaggatctggccgaggaggtggggaacaagctgagccagctcaagctgcactgtctgagcgagagcatttaccgcagcaaagggctgcagcgggaactgcgggcgcacgttgtgaggttccacgagtgcgtggaggagacggagctctactgcggcctgtgcggcgagtccataggcgagaagaacagccggctgcaggccctaccttgctcccacatcttccacctcaggtgcctgcagaacaacgggacccggagctgtcccaactgccgccgctcatccatgaagcctggctttgtatgactcctggcagcaggcgtgggcttcctcctcgccactcctgctctttctccactgcacgccagaggcccatttactcctggggcagctgccaggtcgtcctcaccatagccaaggccttggggcctgcccagggctgctcccctgggcccagctcccctccctgcctctttgtactttgctctttatagaaaaataaactgtttgtacctgg

SEQ ID NO: 322 - RNA, 1622 nt, Homo sapiens
  source 1..1622: mol_type = mRNA
ccaggtacaaacagtttatttttctataaagagcaaagtacaaagaggcagggaggggagctgggcccaggggagcagccctgggcaggccccaaggccttggctatggtgaggacgacctggcagctgccccaggagtaaatgggcctctggcgtgcagtggagaaagagcaggagtggcgaggaggaagcccacgcctgctgccaggagtcatacaaagccaggcttcatggatgagcggcggcagttgggacagctccgggtcccgttgttctgcaggcacctgaggtggaagatgtgggagcaaggtagggcctgcagccggctgttcttctcgcctatggactcgccgcacaggccgcagtagagctccgtctcctccacgcactcgtggaacctcacaacgtgcgcccgcagttcccgctgcagccctttgctgcggtaaatgctctcgctcagacagtgcagcttgagctggctcagcttgttccccacctcctcggccagatcctgggctctctcgatggcatccagagccttgtccagcgccttcctggccacccagcacttggccacacccagcagcgcctgcacctgccccaggcggtttccgatctcggtcatgatgctcatggcggagtcgtacctggggaaggctgtctccaggtccccacggctccggtggatgtcagcgaagcagagcaggcagagcgcctgcagtggccggtccccgtgctgcagcgcgatcttcatagactcctcacaacactccatggcactgcccaggcggcccagcaggcgataggccacggccatgtggtactggctcatggcccggtacttcaggctccagcctttgccatagttgttgacaagctctgccgccttgcaggggaagaacagggctttctcgtagtccttgacctgggcatagaagctgcccaggctgcagcacacgcggcactcgagcatggcgtcatcattgttgtgggcatagcgcagggccttctcgaagctctccagggccttctggaagacgctgaggcccaggaaggcattgcccatgctcaggctgacctggcctccgagctgggcacctgccctggtaccaggcagcccaaggcaggtcttgcagtaggagatggtcttgtgaaactcgcacagcttctcgttgctgcgtgccaggttcaggtagctctccaggaggaagtcggcatcctccagctcccgggccgtgtcgatctggaccacagcgaacttcagcatctccttgtagcggcccatctccgagtgggctgtgaccaggcagcccagcacgcggaagcgccccatgaggtccgagctcttctccagcacctttgtccacacctgcaatgccttctctgtctggttggactggtacagctggagccccttctcgatctgctgcttggtctggtcctgccccatcctccccaagccctgtgtcccacgtggggtgatccctggtggctccgtgcctctaggcactcatggggcaggaatcacagtgccagctgccccccgaaacgtgggaacaaaagcagcgtcgggtgggagccggaatggggcctggatggagagcaggcgccaccctgggaac

SEQ ID NO: 323 - RNA, 1620 nt, Mus musculus
  source 1..1620: mol_type = mRNA
gttcccagggtggcgcccgttgtccatccaggccctgcttagctttttgcctggtgtgctccccccacccccactccccagagatcagccgacaccgtgggtccaacaccatgagggtctaaagacacctagccagccacggtctttccgagtggccaggctgtgggaagatggggcaggaccagacaaagcaacagattgaaaaaggactgcagctgtaccagtccaaccagacagagaaggcactgcaggtgtggatgaaggtgctggagaagggctctgacctcgtgggccgcttccgggtactgggctgcttggtaacagctcactcggagatgggccgctacaaagagatgctgaagtttgccgtggtccagattgatactgctcggggactggaggatgctgacttcctgctcgaaagctacctgaacctggcgcgcagcaatgagaagctatgtgagttccacaaaaccatctcctactgcaagacctgcctcggcctgcctggcaccagggctggtgcccagcttgggggtcaggtcagcctgagcatgggcaatgctttcctgggcctcagcctcttccagaaggccctggagagctttgagaaggccctgcgctatgcccacaacaacgatgacaccatgctggagtgccgtgtctgctgcagcctgggcagtttctacgcccaggtcaaggactatgagaaagccctgttctttccctgcaaggctgcagagcttgtcaacgactatggcaaaggctggagcctcaaatatcgggccatgagccagtaccacatggctgtggcctaccgcctgctgggccacctgggcagtgccatggagtgttgtgaggagtccatgaagattgccctgcagcacggtgaccgcccgctacaggcactctgtctgctctgctttgccgatatccatcggagccgaggggacctggagacagccttccctcggtacgactccgctatgagcatcatgactgagatcggaaaccgcctcgggcaggtgcacgtgctgctgggtgtggccaagtgctggatggcccggaaggtgcaagacaaggctttggatgccattgagaaagcccaggacttagctgaagaggttggcaataagctgagccagctcaagctgcattgcctgagtgagagcatctaccgcagcaaagggctgcagcgtgagctgcgcacgcacgtagtgaggttccacgagtgcgtggaggagactgagctctactgcggcctctgtggtgagtccatcggggagaggaacagccggctgcaggccctgccctgctcccacatctttcatctcagatgcctgcaaaacaatggcactaggagctgccccaactgccgccgctcctccatgaagccgggctttgtgtgacttcagcggccatcttgggtttccacacaacctcccctggctccttctccaccatcaagcccgaggccctggtgaaattctagggtatcggccaggtcctccatagccaactcagggccagaggcctgcttgctgctcctctgggcctagctcccctcccctgcctctttctacgttgttctttatagaaaaataaaatgtttgtacctgg

SEQ ID NO: 324 - RNA, 1620 nt, Mus musculus
  source 1..1620: mol_type = mRNA
ccaggtacaaacattttatttttctataaagaacaacgtagaaagaggcaggggaggggagctaggcccagaggagcagcaagcaggcctctggccctgagttggctatggaggacctggccgataccctagaatttcaccagggcctcgggcttgatggtggagaaggagccaggggaggttgtgtggaaacccaagatggccgctgaagtcacacaaagcccggcttcatggaggagcggcggcagttggggcagctcctagtgccattgttttgcaggcatctgagatgaaagatgtgggagcagggcagggcctgcagccggctgttcctctccccgatggactcaccacagaggccgcagtagagctcagtctcctccacgcactcgtggaacctcactacgtgcgtgcgcagctcacgctgcagccctttgctgcggtagatgctctcactcaggcaatgcagcttgagctggctcagcttattgccaacctcttcagctaagtcctgggctttctcaatggcatccaaagccttgtcttgcaccttccgggccatccagcacttggccacacccagcagcacgtgcacctgcccgaggcggtttccgatctcagtcatgatgctcatagcggagtcgtaccgagggaaggctgtctccaggtcccctcggctccgatggatatcggcaaagcagagcagacagagtgcctgtagcgggcggtcaccgtgctgcagggcaatcttcatggactcctcacaacactccatggcactgcccaggtggcccagcaggcggtaggccacagccatgtggtactggctcatggcccgatatttgaggctccagcctttgccatagtcgttgacaagctctgcagccttgcagggaaagaacagggctttctcatagtccttgacctgggcgtagaaactgcccaggctgcagcagacacggcactccagcatggtgtcatcgttgttgtgggcatagcgcagggccttctcaaagctctccagggccttctggaagaggctgaggcccaggaaagcattgcccatgctcaggctgacctgacccccaagctgggcaccagccctggtgccaggcaggccgaggcaggtcttgcagtaggagatggttttgtggaactcacatagcttctcattgctgcgcgccaggttcaggtagctttcgagcaggaagtcagcatcctccagtccccgagcagtatcaatctggaccacggcaaacttcagcatctctttgtagcggcccatctccgagtgagctgttaccaagcagcccagtacccggaagcggcccacgaggtcagagcccttctccagcaccttcatccacacctgcagtgccttctctgtctggttggactggtacagctgcagtcctttttcaatctgttgctttgtctggtcctgccccatcttcccacagcctggccactcggaaagaccgtggctggctaggtgtctttagaccctcatggtgttggacccacggtgtcggctgatctctggggagtgggggtggggggagcacaccaggcaaaaagctaagcagggcctggatggacaacgggcgccaccctgggaac

SEQ ID NO: 325 - RNA, 1430 nt, Rattus norvegicus
  source 1..1430: mol_type = mRNA
tgttcccagggtggcgcccgttgtccatccaggccctgcttagcttttgcctggtgttgcttttccctcccagagatcagctggcactgtgggtccaacaccatgaaggtctaaagacacctagccaaccacggtctttccgagtggccagactgtgggaggatggggcaggaccagacaaagcaacagatcgaaaaaggactgcagctgtaccagtccaaccagacagagaaggcactgcaagtgtggatgaaggtgctggagaagggctctgacctcgtgggccgcttccgggtgctgggctgcttggtaacagctcactcggagatgggccgctacaaagagatgctgaagtttgccgtggtccagatcgacactgctcgggaactggaggatgcggatttcctgctcgaaagctacctgaacctggcacgcagcaatgagaagctatgtgagtttcacaaaaccatctcctactgcaagacctgcctcggcctgcctggcaccagggctggtgcccagcttgggggtcaggtcagcctgagcatgggcaatgctttcctgggcctcagcctcttccagaaggccctagagagctttgagaaggccctgcgctatgcccacaacaatgatgacaccatgctggagtgccgcgtctgctgcagcctgggcagtttctacgcccaggtcaaggagtccatgaagattgccctgcagcatggtgaccgcccactgcaagcactctgtctgctctgctttgccgatatccaccggagccgtggggacctggagacagccttccctaggtacgattccgctatgagcatcatgaccgagatcggaaaccgcctggggcaagtgcatgtgctgctgggtgtggccaagtgctggatagccaggaaagtgctggacaaggctttggatgccattgagaaagcccaggacctggctgaagaggttggaaataagctgagccagctcaagctgcactgcctgagtgagggcatctgccgcagcaaggggctgcagcgtgagctgcgcgcgcatgtagtgaggttccacgagtgcgtggaggagactgagctctactgtggcctctgtggtgagtccattggggagaagaacagccggctgcaggccctgccctgctcccacatctttcatctcagatgcctgcaaaacaacggcactaggagttgccccaactgccgccgctcctccatgaagccaggctttgtgtgacctcagtggccatcttggcacctccaccatcaagctggaggccctggtgaaatcctagggtagcagccaggacctccacagccaactcagggccagaggcctgcctgctgctcctctgggcctacctcccctcccttgcctctttgtactttgttctttatagaaaaataaaatgtttctacctggtg

SEQ ID NO: 326 - RNA, 1430 nt, Rattus norvegicus
  source 1..1430: mol_type = mRNA
caccaggtagaaacattttatttttctataaagaacaaagtacaaagaggcaagggaggggaggtaggcccagaggagcagcaggcaggcctctggccctgagttggctgtggaggtcctggctgctaccctaggatttcaccagggcctccagcttgatggtggaggtgccaagatggccactgaggtcacacaaagcctggcttcatggaggagcggcggcagttggggcaactcctagtgccgttgttttgcaggcatctgagatgaaagatgtgggagcagggcagggcctgcagccggctgttcttctccccaatggactcaccacagaggccacagtagagctcagtctcctccacgcactcgtggaacctcactacatgcgcgcgcagctcacgctgcagccccttgctgcggcagatgccctcactcaggcagtgcagcttgagctggctcagcttatttccaacctcttcagccaggtcctgggctttctcaatggcatccaaagccttgtccagcactttcctggctatccagcacttggccacacccagcagcacatgcacttgccccaggcggtttccgatctcggtcatgatgctcatagcggaatcgtacctagggaaggctgtctccaggtccccacggctccggtggatatcggcaaagcagagcagacagagtgcttgcagtgggcggtcaccatgctgcagggcaatcttcatggactccttgacctgggcgtagaaactgcccaggctgcagcagacgcggcactccagcatggtgtcatcattgttgtgggcatagcgcagggccttctcaaagctctctagggccttctggaagaggctgaggcccaggaaagcattgcccatgctcaggctgacctgacccccaagctgggcaccagccctggtgccaggcaggccgaggcaggtcttgcagtaggagatggttttgtgaaactcacatagcttctcattgctgcgtgccaggttcaggtagctttcgagcaggaaatccgcatcctccagttcccgagcagtgtcgatctggaccacggcaaacttcagcatctctttgtagcggcccatctccgagtgagctgttaccaagcagcccagcacccggaagcggcccacgaggtcagagcccttctccagcaccttcatccacacttgcagtgccttctctgtctggttggactggtacagctgcagtcctttttcgatctgttgctttgtctggtcctgccccatcctcccacagtctggccactcggaaagaccgtggttggctaggtgtctttagaccttcatggtgttggacccacagtgccagctgatctctgggagggaaaagcaacaccaggcaaaagctaagcagggcctggatggacaacgggcgccaccctgggaaca

SEQ ID NO: 327 - RNA, 2116 nt, Macaca fascicularis
  source 1..2116: mol_type = mRNA
tgatgggggagaagcagggctgggcgctcacctggcttccccagacctgcaggtccagccttgctctccttcccccgagcacctctggcccaaggcctgcccacttgctggagctggccccttggcgaggctgctgggagggcccgtgctgccagggcggtcagagtcagtgttggaggtgccgcagggacgcccaagggggtgcccaggtggcaagatgcctgtatgttcagggaagccacgtcccagctcgcgagtgggtgcacagaggcccgcgtgaccttgctgctgacattcctcagaggccacgtggccccaactggcagggacagctgtggacagggactgaaccagccttgttcccagggtggcgcctgctctccatccaggccccactcccgctcccacccgatgctgcttttgttcccaggtttcagggggcagccggcactgtgattcctgtgctatgagtgcctagaggcacggagccacgaggggtcaccccacgtggggcacagggcttggggagcatggggcaggaccagaccaagcagcagatcgagaaggggctccagctgtatcagtccaaccagacagagaaagcactgcaggtgtggatgaaggtgctggagaagagctcggacctcatggggcgcttccgcgtgctgggctgcctggtcacggcccactcagagatgggccgatacaaggagatgctgaagttcgctgtggtccagatcgacacggcccgggagctggaggatgccgacttcctcctggagagctacctgaacctggcccgcagcaacgagaagctgtgcgagtttcacaagaccatctcctactgcaagacctgccttgggctgcctggtaccagggcaggtgcccagctcggaggccaggtcagcctgagcatgggcaatgccttcctgggcctcagcgtcttccagaaggccctggagagcttcgagaaggccctgcgctacgcccacaacaacgatgacgccatgctcgagtgccgcgtgtgctgcagcctgggcagcttctatgcccaggtcaaggactacgagaaagccctgttcttcccctgcaaagccgcagagctcgtcaacgactatggcaaaggctggagcctgaagtaccgggccatgagccagtaccacatggccgtggcctatcgcctgctgggccacctgggcagtgccatggagtgttgcgaggagtctatgaagatcgcactgcagcatggggaccggccactgcaggcgctctgcctactttgcttcgctgacatccaccggagccgtggggacctggagacagccttccccaggtatgactccgccatgagcatcatgaccgagattggaaaccgcctggggcaagtgcaggcgctgctgggtgtggccaagtgctgggtagccagaaaggcgctggacaaggctctggacgtcatcgagagagcccaggatctggctgaggaggtggggaacaaggaagcaaggtcccagagagggcaggacgttttcccgaggtccatcaggaagacagggaagtggctgagactggagcctgcctgcactgactttgctctcatcccccactgccactctccactcccgcgggccccagctgagccagctcaagctgcactgtctgagcgagagcatttaccgcagcaaagggctgcagcgggaactgcgggcgcatgtcgtgaggttccacgagtgtgtggaggagacggagctctactgcggcctgtgtggcgagtccataggcgagaagaacagccggctgcaggccctgccctgctcccacatcttccacctcaggtgcctgcaaaacaacgggacccggagctgtcccaactgccgccgctcatccatgaagcctggctttgtgtgactcccggcagcaggtgtgggcttcctcctcgccgctcctgctccttctccactgcacactggagacccatttactcctggggcagctgccagcatgtcgtcaccacagccagggccttgggacctgcccacggctgctcccctgggcccagctcccctccctgcctctttgtactttgctcttcatagaaaaataaaccgtttgtacctgg

SEQ ID NO: 328 - RNA, 2116 nt, Macaca fascicularis
  source 1..2116: mol_type = mRNA
ccaggtacaaacggtttatttttctatgaagagcaaagtacaaagaggcagggaggggagctgggcccaggggagcagccgtgggcaggtcccaaggccctggctgtggtgacgacatgctggcagctgccccaggagtaaatgggtctccagtgtgcagtggagaaggagcaggagcggcgaggaggaagcccacacctgctgccgggagtcacacaaagccaggcttcatggatgagcggcggcagttgggacagctccgggtcccgttgttttgcaggcacctgaggtggaagatgtgggagcagggcagggcctgcagccggctgttcttctcgcctatggactcgccacacaggccgcagtagagctccgtctcctccacacactcgtggaacctcacgacatgcgcccgcagttcccgctgcagccctttgctgcggtaaatgctctcgctcagacagtgcagcttgagctggctcagctggggcccgcgggagtggagagtggcagtgggggatgagagcaaagtcagtgcaggcaggctccagtctcagccacttccctgtcttcctgatggacctcgggaaaacgtcctgccctctctgggaccttgcttccttgttccccacctcctcagccagatcctgggctctctcgatgacgtccagagccttgtccagcgcctttctggctacccagcacttggccacacccagcagcgcctgcacttgccccaggcggtttccaatctcggtcatgatgctcatggcggagtcatacctggggaaggctgtctccaggtccccacggctccggtggatgtcagcgaagcaaagtaggcagagcgcctgcagtggccggtccccatgctgcagtgcgatcttcatagactcctcgcaacactccatggcactgcccaggtggcccagcaggcgataggccacggccatgtggtactggctcatggcccggtacttcaggctccagcctttgccatagtcgttgacgagctctgcggctttgcaggggaagaacagggctttctcgtagtccttgacctgggcatagaagctgcccaggctgcagcacacgcggcactcgagcatggcgtcatcgttgttgtgggcgtagcgcagggccttctcgaagctctccagggccttctggaagacgctgaggcccaggaaggcattgcccatgctcaggctgacctggcctccgagctgggcacctgccctggtaccaggcagcccaaggcaggtcttgcagtaggagatggtcttgtgaaactcgcacagcttctcgttgctgcgggccaggttcaggtagctctccaggaggaagtcggcatcctccagctcccgggccgtgtcgatctggaccacagcgaacttcagcatctccttgtatcggcccatctctgagtgggccgtgaccaggcagcccagcacgcggaagcgccccatgaggtccgagctcttctccagcaccttcatccacacctgcagtgctttctctgtctggttggactgatacagctggagccccttctcgatctgctgcttggtctggtcctgccccatgctccccaagccctgtgccccacgtggggtgacccctcgtggctccgtgcctctaggcactcatagcacaggaatcacagtgccggctgccccctgaaacctgggaacaaaagcagcatcgggtgggagcgggagtggggcctggatggagagcaggcgccaccctgggaacaaggctggttcagtccctgtccacagctgtccctgccagttggggccacgtggcctctgaggaatgtcagcagcaaggtcacgcgggcctctgtgcacccactcgcgagctgggacgtggcttccctgaacatacaggcatcttgccacctgggcacccccttgggcgtccctgcggcacctccaacactgactctgaccgccctggcagcacgggccctcccagcagcctcgccaaggggccagctccagcaagtgggcaggccttgggccagaggtgctcgggggaaggagagcaaggctggacctgcaggtctggggaagccaggtgagcgcccagccctgcttctcccccatca

SEQ ID NO: 329 - RNA, 2075 nt, Macaca mulatta
  source 1..2075: mol_type = mRNA
cagacctgcaggtccagccttgctctccttcccccgagcacctctggcccaaggcctgcccacttgctggagctggccccttggcgaggctgctgggagggcccgtgctgccaggggggtcagagtcagtgttggaggtgccgcagggacgcccaagggggtgcccaggtggcaagatgcctgtatgttcagggaagccacgtcccagctcgcgagtgggtgcacagaggcccgcgtgaccttgctgctgacattcctcagaggccacgtggccccaactggcagggacagctgtggacagggactgaaccagccttgttcccagggtggcgcctgctctccatccaggccccactcccgctcccacccgatgctgcttttgttcccaggtttcagggggcagccggcactgtgattcctgtgctatgagtgcctagaggcacggagccacgaggggtcaccccacgtggggcacagggcttggggagcatggggcaggaccagaccaagcagcagattgagaaggggctccagctgtatcagtccaaccagacagagaaagcactgcaggtgtggatgaaggtgctggagaagagctcggacctcatggggcgcttccgcgtgctgggctgcctggtcacggcccactcagagatgggccgatacaaggagatgctgaagttcgctgtggtccagatcgacacggcccgggagctggaggatgccgacttcctcctggagagctacctgaacctggcccgcagcaacgagaagctgtgcgagtttcacaagaccatctcctactgcaagacctgccttgggctgcctggtaccagggcaggtgcccagctcggaggccaggtcagcctgagcatgggcaatgccttcctgggcctcagcgtcttccagaaggccctggagagcttcgagaaggccctgcgctacgcccacaacaacgatgacgccatgctcgagtgccgcgtgtgctgcagcctgggcagcttctatgcccaggtcaaggactacgagaaagccctgttcttcccctgcaaagccgcagagctcgtcaacgactatggcaaaggctggagcctgaagtaccgggccatgagccagtaccacatggccgtggcctatcgcctgctgggccacctgggcagtgccatggagtgttgcgaggagtctatgaagatcgcactgcagcatggggaccggccactgcaggctctctgcctactttgcttcgctgacatccaccggagccgtggggacctggagacagccttccccaggtatgactccgccatgagcatcatgaccgagattggaaaccgcctggggcaagtgcaggcgctgctgggtgtggccaagtgctgggtagccagaaagacgctggacaaggctctggacgtcatcgagagagcccaggatctggctgaggaggtggggaacaaggaagcaaggtcccagagagggcaggacgttttcccgaggtccatcaggaagacagggaagtggctgagactggagcctgcctgcactgactttgctctcatcccccactgccactctccactcccgcgggccccagctgagccagctcaagctgcactgtctgagcgagagcatttaccgcagcaaagggctgcagcgggaactgcgggcgcatgtcgtgaggttccacgagtgtgtggaggagacggagctctactgcggcctgtgtggcgagtccataggcgagaagaacagccggctgcaggccctgccctgctcccacatcttccacctcaggtgcctgcaaaacaacgggacccggagctgtcccaactgccgccgctcatccatgaagcctggctttgtgtgactcccggcagcaggtgtgggcttcctcctcgccgctcctgctccttctccactgcacactggagacccatttactcctggggcagctgccagcatgtcgtcaccacagccagggccttgggacctgcccacggctgctcccctgggcccagctcccctccctgcctctttgtactttgctcttcatagaaaaataaaccgtttgtacctgg

SEQ ID NO: 330 - RNA, 2075 nt, Macaca mulatta
  source 1..2075: mol_type = mRNA
ccaggtacaaacggtttatttttctatgaagagcaaagtacaaagaggcagggaggggagctgggcccaggggagcagccgtgggcaggtcccaaggccctggctgtggtgacgacatgctggcagctgccccaggagtaaatgggtctccagtgtgcagtggagaaggagcaggagcggcgaggaggaagcccacacctgctgccgggagtcacacaaagccaggcttcatggatgagcggcggcagttgggacagctccgggtcccgttgttttgcaggcacctgaggtggaagatgtgggagcagggcagggcctgcagccggctgttcttctcgcctatggactcgccacacaggccgcagtagagctccgtctcctccacacactcgtggaacctcacgacatgcgcccgcagttcccgctgcagccctttgctgcggtaaatgctctcgctcagacagtgcagcttgagctggctcagctggggcccgcgggagtggagagtggcagtgggggatgagagcaaagtcagtgcaggcaggctccagtctcagccacttccctgtcttcctgatggacctcgggaaaacgtcctgccctctctgggaccttgcttccttgttccccacctcctcagccagatcctgggctctctcgatgacgtccagagccttgtccagcgtctttctggctacccagcacttggccacacccagcagcgcctgcacttgccccaggcggtttccaatctcggtcatgatgctcatggcggagtcatacctggggaaggctgtctccaggtccccacggctccggtggatgtcagcgaagcaaagtaggcagagagcctgcagtggccggtccccatgctgcagtgcgatcttcatagactcctcgcaacactccatggcactgcccaggtggcccagcaggcgataggccacggccatgtggtactggctcatggcccggtacttcaggctccagcctttgccatagtcgttgacgagctctgcggctttgcaggggaagaacagggctttctcgtagtccttgacctgggcatagaagctgcccaggctgcagcacacgcggcactcgagcatggcgtcatcgttgttgtgggcgtagcgcagggccttctcgaagctctccagggccttctggaagacgctgaggcccaggaaggcattgcccatgctcaggctgacctggcctccgagctgggcacctgccctggtaccaggcagcccaaggcaggtcttgcagtaggagatggtcttgtgaaactcgcacagcttctcgttgctgcgggccaggttcaggtagctctccaggaggaagtcggcatcctccagctcccgggccgtgtcgatctggaccacagcgaacttcagcatctccttgtatcggcccatctctgagtgggccgtgaccaggcagcccagcacgcggaagcgccccatgaggtccgagctcttctccagcaccttcatccacacctgcagtgctttctctgtctggttggactgatacagctggagccccttctcaatctgctgcttggtctggtcctgccccatgctccccaagccctgtgccccacgtggggtgacccctcgtggctccgtgcctctaggcactcatagcacaggaatcacagtgccggctgccccctgaaacctgggaacaaaagcagcatcgggtgggagcgggagtggggcctggatggagagcaggcgccaccctgggaacaaggctggttcagtccctgtccacagctgtccctgccagttggggccacgtggcctctgaggaatgtcagcagcaaggtcacgcgggcctctgtgcacccactcgcgagctgggacgtggcttccctgaacatacaggcatcttgccacctgggcacccccttgggcgtccctgcggcacctccaacactgactctgacccccctggcagcacgggccctcccagcagcctcgccaaggggccagctccagcaagtgggcaggccttgggccagaggtgctcgggggaaggagagcaaggctggacctgcaggtctg

SEQ ID NO: 331 - RNA, 7805 nt, Homo sapiens
  source 1..7805: mol_type = mRNA
ccagcaccccggggctgcgcactgcagctccccaggccacccaccacccttctggtctctgagcccaggatgcgaggatggccagaccatctctgtgcaccctggtgcctctgggccctgagtgcttgcgccccttcacccgggagtcactggcagccatagaacagcgggcggtggaggaggaggcccggctgcagcggaataagcagatggagattgaggagcccgaacggaagccacgaagtgacttggaggctggcaagaacctacccatgatctacggagaccccccgccggaggtcatcggcatccccctggaggacctggatccctactacagcaataagaagaccttcatcgtactcaacaagggcaaggccatcttccgcttctccgccacacctgctctctacctgctgagccccttcagcgtagtcaggcgcggggccatcaaggtgctcatccatgcgctgttcagcatgttcatcatgatcaccatcttgaccaactgcgtattcatgaccatgagtgacccgcctccctggtccaagaatgtggagtacaccttcacagggatctacacctttgagtccctcatcaagatactggcccgaggcttctgtgtcgacgacttcacattcctccgggacccctggaactggctggacttcagtgtcatcatgatggcgtacctgacagagtttgtggacttgggcaacatctcagccctgaggaccttccgggtgctgcgggccctcaaaaccatcacggtcatcccagggctgaagacgatcgtgggggccctgatccagtcggtgaaaaagctgtcggatgtgatgatcctcactgtcttctgcctgagcgtctttgcgctggtaggactgcagctcttcatgggaaacctgaggcagaagtgtgtgcgctggcccccgccgttcaacgacaccaacaccacgtggtacagcaatgacacgtggtacggcaatgacacatggtatggcaatgagatgtggtacggcaatgactcatggtatgccaacgacacgtggaacagccatgcaagctgggccaccaacgatacctttgattgggacgcctacatcagtgatgaagggaacttctacttcctggagggctccaacgatgccctgctctgtgggaacagcagtgatgctgggcactgccctgagggttatgagtgcatcaagaccgggcggaaccccaactatggctacaccagctatgacaccttcagctgggccttcttggctctcttccgcctcatgacacaggactattgggagaacctcttccagctgacccttcgagcagctggcaagacctacatgatcttcttcgtggtcatcatcttcctgggctctttctacctcatcaatctgatcctggccgtggtggccatggcatatgccgagcagaatgaggccaccctggccgaggataaggagaaagaggaggagtttcagcagatgcttgagaagttcaaaaagcaccaggaggagctggagaaggccaaggccgcccaagctctggaaggtggggaggcagatggggacccagcccatggcaaagactgcaatggcagcctggacacatcgcaaggggagaagggagccccgaggcagagcagcagcggagacagcggcatctccgacgccatggaagaactggaagaggcccaccaaaagtgcccaccatggtggtacaagtgcgcccacaaagtgctcatatggaactgctgcgccccgtggctgaagttcaagaacatcatccacctgatcgtcatggacccgttcgtggacctgggcatcaccatctgcatcgtgctcaacaccctcttcatggccatggaacattaccccatgacggagcactttgacaacgtgctcactgtgggcaacctggtcttcacaggcatcttcacagcagagatggttctgaagctgattgccatggacccctacgagtatttccagcagggttggaatatcttcgacagcatcatcgtcaccctcagcctggtagagctaggcctggccaacgtacagggactgtctgtgctacgctccttccgtctgctgcgggtcttcaagctggccaagtcgtggccaacgctgaacatgctcatcaagatcattggcaattcagtgggggcgctgggtaacctgacgctggtgctggctatcatcgtgttcatcttcgccgtggtgggcatgcagctgtttggcaagagctacaaggagtgcgtgtgcaagattgccttggactgcaacctgccgcgctggcacatgcatgatttcttccactccttcctcatcgtcttccgcatcctgtgcggggagtggatcgagaccatgtgggactgcatggaggtggccggccaagccatgtgcctcaccgtcttcctcatggtcatggtcatcggcaatcttgtggtcctgaacctgttcctggctctgctgctgagctccttcagcgccgacagtctggcagcctcggatgaggatggcgagatgaacaacctgcagattgccatcgggcgcatcaagttgggcatcggctttgccaaggccttcctcctggggctgctgcatggcaagatcctgagccccaaggacatcatgctcagcctcggggaggctgacggggccggggaggctggagaggcgggggagactgcccccgaggatgagaagaaggagccgcccgaggaggacctgaagaaggacaatcacatcctgaaccacatgggcctggctgacggccccccatccagcctcgagctggaccaccttaacttcatcaacaacccctacctgaccatacaggtgcccatcgcctccgaggagtccgacctggagatgcccaccgaggaggaaaccgacactttctcagagcctgaggatagcaagaagccgccgcagcctctctatgatgggaactcgtccgtctgcagcacagctgactacaagccccccgaggaggaccctgaggagcaggcagaggagaaccccgagggggagcagcctgaggagtgcttcactgaggcctgcgtgcagcgctggccctgcctctacgtggacatctcccagggccgtgggaagaagtggtggactctgcgcagggcctgcttcaagattgtcgagcacaactggttcgagaccttcattgtcttcatgatcctgctcagcagtggggctctggccttcgaggacatctacattgagcagcggcgagtcattcgcaccatcctagaatatgccgacaaggtcttcacctacatcttcatcatggagatgctgctcaaatgggtggcctacggctttaaggtgtacttcaccaacgcctggtgctggctcgacttcctcatcgtggatgtctccatcatcagcttggtggccaactggctgggctactcggagctgggacccatcaaatccctgcggacactgcgggccctgcgtcccctgagggcactgtcccgattcgagggcatgagggtggtggtgaacgccctcctaggcgccatcccctccatcatgaatgtgctgcttgtctgcctcatcttctggctgatcttcagcatcatgggtgtcaacctgtttgccggcaagttctactactgcatcaacaccaccacctctgagaggttcgacatctccgaggtcaacaacaagtctgagtgcgagagcctcatgcacacaggccaggtccgctggctcaatgtcaaggtcaactacgacaacgtgggtctgggctacctctccctcctgcaggtggccaccttcaagggttggatggacatcatgtatgcagccgtggactcccgggagaaggaggagcagccgcagtacgaggtgaacctctacatgtacctctactttgtcatcttcatcatctttggctccttcttcaccctcaacctcttcattggcgtcatcattgacaacttcaaccagcagaagaagaagttaggggggaaagacatctttatgacggaggaacagaagaaatactataacgccatgaagaagcttggctccaagaagcctcagaagccaattccccggccccagaacaagatccagggcatggtgtatgacctcgtgacgaagcaggccttcgacatcaccatcatgatcctcatctgcctcaacatggtcaccatgatggtggagacagacaaccagagccagctcaaggtggacatcctgtacaacatcaacatgatcttcatcatcatcttcacaggggagtgcgtgctcaagatgctcgccctgcgccagtactacttcaccgttggctggaacatctttgacttcgtggtcgtcatcctgtccattgtgggccttgccctctctgacctgatccagaagtacttcgtgtcacccacgctgttccgtgtgatccgcctggcgcggattgggcgtgtcctgcggctgatccgcggggccaagggcatccggacgctgctgttcgccctcatgatgtcgctgcctgccctcttcaacatcggcctcctcctcttcctggtcatgttcatctactccatcttcggcatgtccaactttgcctacgtcaagaaggagtcgggcatcgatgatatgttcaacttcgagaccttcggcaacagcatcatctgcctgttcgagatcaccacgtcggccggctgggacgggctcctcaaccccatcctcaacagcgggcccccagactgtgaccccaacctggagaacccgggcaccagtgtcaagggtgactgcggcaacccctccatcggcatctgcttcttctgcagctatatcatcatctccttcctcatcgtggtcaacatgtacatcgccatcatcctggagaacttcaatgtggccacagaggagagcagcgagccccttggtgaagatgactttgagatgttctacgagacatgggagaagttcgaccccgacgccacccagttcatcgcctacagccgcctctcagacttcgtggacaccctgcaggaaccgctgaggattgccaagcccaacaagatcaagctcatcacactggacttgcccatggtgccaggggacaagatccactgcctggacatcctctttgccctgaccaaagaggtcctgggtgactctggggaaatggacgccctcaagcagaccatggaggagaagttcatggcagccaacccctccaaggtgtcctacgagcccatcaccaccaccctcaagaggaagcacgaggaggtgtgcgccatcaagatccagagggcctaccgccggcacctgctacagcgctccatgaagcaggcatcctacatgtaccgccacagccacgacggcagcggggatgacgcccctgagaaggaggggctgcttgccaacaccatgagcaagatgtatggccacgagaatgggaacagcagctcgccaagcccggaggagaagggcgaggcaggggacgccggacccactatggggctgatgcccatcagcccctcagacactgcctggcctcccgcccctcccccagggcagactgtgcgcccaggtgtcaaggagtctcttgtctagcaggcagcatcggggtggcccactgagtctcggcatagtccccagagctcccccgtggtgcctgcacacagagtgagggaggagggctttgaatctgggactgtgcctggctccctgatgggggacaggatttggccacactggggctgacacccaggcccgagcgcctgcgttcccagaccatgggaaatgggaattgcgctcaggggctccatgctgggtctgaggcccctgcctccaagatttaacctgcaagttgctctgacctcctctgggccctgtcgcccctccttttggcctgggggaggtcagaacattcgaatctctgcccctcacttgaggaggagctggcctgcggtggagggatcagttgccccccatcaccagagtcttaagggtcactggcctctccccaggaagtggctcagacccctcagccccagcccagacaaagatgtcttaacctcagggagtgcagacacctaaccccagggcactgccagcccaccccctttgactctggggtgcagcttcacccaccaggccagctcaggaattccctggaaaagggaaatgtgactggttcagaaatagctcctcaaagcctcaaaacctgattggccactggatcctgctgctttgggctgggatggtgactcctgaaacctcttcctaggccacgtccaggtccgtagctcccctggctggctcctaggggaagagcagaaggaaggatgccacttgggaatgaattgtccttttctaggaagcacgggggagtgagacaggctgggtcctgccagctggatcgctgcacatggcctgagcatccagacctgagcgggagtcagggacctgctgctcagtaagaagattctcgccccttccctctctccctgcctcactcctccgtgagcaccaccagggctccaggagcctcatccagcctcagagatctcccttctcatctccccacgcccgtctctttctcacctttcccacctctctccccaaagtgatcctaagaatgtacagttgagctcaggttagatatttcgaccctggggcgtgcagcagggaaggcccaactggttcaggctcaaccttccaacttcctgtggcctgaagaagcacttctgctgcatcgctgttctgggcatggcagggccaggcctctgctggctcaggaggaggggtgagagacctgctcaggcgtcgctggatttattcacttgtgtgtgtacctgtggctgtgtgtctgcttgtatgcttttataggcctgtgtgtatagctgtgtgtgtgttcaagtgcgtgactgtatgtgtgtgtgtgaaccactgtgtactggagcctgcattatgcacgtgtctgggtatctttgtatatatgtgtatatatgtgtgccctggactgtttcaaggtccatggagtacggctggtgtgtcatactgtgcaggcctgtccctgggagtgttcccgtgcctgggagagtggacctgtgctgtgagtgtgtggatgcgtgtgaacgcatgtggtaaggtgtgtactcagggcattctgttggcctaagtgcctcttctttttcttcttgtttctcatgaaaagtttgattaaaattcaggaagcagcaaaaccttcaaaacaagacatgtatgtgtgcttgagtgtgtgaacacgtgtgtgtgtgtgcacatctacatgccatgcctatgggccagagttgtctttattgtccaccatgctctctcacctgctcccagtcctgcctgaacagccctctctctcactcccctctcctccccttcctgtttctcgttgtcacacccatggcctcagccctgctccctgcctcctgcctatgtctcctctatggaaggaggcctccactccttccatctcttccttcagaagtttcgtctaatgggggcagtctccccttcctggcacattgcccctctgccttgccctcctgggccctgggctggcacagcccctggagcctcagaaatctgtttgattggatattctcctcggactgtgtgcaggttgcagaggaagagtagatgagccgggtccggcctctccctgcctgtggcccctcccctgcagacggatgcccattcctgcctggtccagtggggaacaggtcccacgccaggccagcaggcgggctcctttgtacagttcttacaataaaccctccttggtgcctctgg

SEQ ID NO: 332 - RNA, 7805 nt, Homo sapiens
  source 1..7805: mol_type = mRNA
ccagaggcaccaaggagggtttattgtaagaactgtacaaaggagcccgcctgctggcctggcgtgggacctgttccccactggaccaggcaggaatgggcatccgtctgcaggggaggggccacaggcagggagaggccggacccggctcatctactcttcctctgcaacctgcacacagtccgaggagaatatccaatcaaacagatttctgaggctccaggggctgtgccagcccagggcccaggagggcaaggcagaggggcaatgtgccaggaaggggagactgcccccattagacgaaacttctgaaggaagagatggaaggagtggaggcctccttccatagaggagacataggcaggaggcagggagcagggctgaggccatgggtgtgacaacgagaaacaggaaggggaggagaggggagtgagagagagggctgttcaggcaggactgggagcaggtgagagagcatggtggacaataaagacaactctggcccataggcatggcatgtagatgtgcacacacacacacgtgttcacacactcaagcacacatacatgtcttgttttgaaggttttgctgcttcctgaattttaatcaaacttttcatgagaaacaagaagaaaaagaagaggcacttaggccaacagaatgccctgagtacacaccttaccacatgcgttcacacgcatccacacactcacagcacaggtccactctcccaggcacgggaacactcccagggacaggcctgcacagtatgacacaccagccgtactccatggaccttgaaacagtccagggcacacatatatacacatatatacaaagatacccagacacgtgcataatgcaggctccagtacacagtggttcacacacacacatacagtcacgcacttgaacacacacacagctatacacacaggcctataaaagcatacaagcagacacacagccacaggtacacacacaagtgaataaatccagcgacgcctgagcaggtctctcacccctcctcctgagccagcagaggcctggccctgccatgcccagaacagcgatgcagcagaagtgcttcttcaggccacaggaagttggaaggttgagcctgaaccagttgggccttccctgctgcacgccccagggtcgaaatatctaacctgagctcaactgtacattcttaggatcactttggggagagaggtgggaaaggtgagaaagagacgggcgtggggagatgagaagggagatctctgaggctggatgaggctcctggagccctggtggtgctcacggaggagtgaggcagggagagagggaaggggcgagaatcttcttactgagcagcaggtccctgactcccgctcaggtctggatgctcaggccatgtgcagcgatccagctggcaggacccagcctgtctcactcccccgtgcttcctagaaaaggacaattcattcccaagtggcatccttccttctgctcttcccctaggagccagccaggggagctacggacctggacgtggcctaggaagaggtttcaggagtcaccatcccagcccaaagcagcaggatccagtggccaatcaggttttgaggctttgaggagctatttctgaaccagtcacatttcccttttccagggaattcctgagctggcctggtgggtgaagctgcaccccagagtcaaagggggtgggctggcagtgccctggggttaggtgtctgcactccctgaggttaagacatctttgtctgggctggggctgaggggtctgagccacttcctggggagaggccagtgacccttaagactctggtgatggggggcaactgatccctccaccgcaggccagctcctcctcaagtgaggggcagagattcgaatgttctgacctcccccaggccaaaaggaggggcgacagggcccagaggaggtcagagcaacttgcaggttaaatcttggaggcaggggcctcagacccagcatggagcccctgagcgcaattcccatttcccatggtctgggaacgcaggcgctcgggcctgggtgtcagccccagtgtggccaaatcctgtcccccatcagggagccaggcacagtcccagattcaaagccctcctccctcactctgtgtgcaggcaccacgggggagctctggggactatgccgagactcagtgggccaccccgatgctgcctgctagacaagagactccttgacacctgggcgcacagtctgccctgggggaggggcgggaggccaggcagtgtctgaggggctgatgggcatcagccccatagtgggtccggcgtcccctgcctcgcccttctcctccgggcttggcgagctgctgttcccattctcgtggccatacatcttgctcatggtgttggcaagcagcccctccttctcaggggcgtcatccccgctgccgtcgtggctgtggcggtacatgtaggatgcctgcttcatggagcgctgtagcaggtgccggcggtaggccctctggatcttgatggcgcacacctcctcgtgcttcctcttgagggtggtggtgatgggctcgtaggacaccttggaggggttggctgccatgaacttctcctccatggtctgcttgagggcgtccatttccccagagtcacccaggacctctttggtcagggcaaagaggatgtccaggcagtggatcttgtcccctggcaccatgggcaagtccagtgtgatgagcttgatcttgttgggcttggcaatcctcagcggttcctgcagggtgtccacgaagtctgagaggcggctgtaggcgatgaactgggtggcgtcggggtcgaacttctcccatgtctcgtagaacatctcaaagtcatcttcaccaaggggctcgctgctctcctctgtggccacattgaagttctccaggatgatggcgatgtacatgttgaccacgatgaggaaggagatgatgatatagctgcagaagaagcagatgccgatggaggggttgccgcagtcacccttgacactggtgcccgggttctccaggttggggtcacagtctgggggcccgctgttgaggatggggttgaggagcccgtcccagccggccgacgtggtgatctcgaacaggcagatgatgctgttgccgaaggtctcgaagttgaacatatcatcgatgcccgactccttcttgacgtaggcaaagttggacatgccgaagatggagtagatgaacatgaccaggaagaggaggaggccgatgttgaagagggcaggcagcgacatcatgagggcgaacagcagcgtccggatgcccttggccccgcggatcagccgcaggacacgcccaatccgcgccaggcggatcacacggaacagcgtgggtgacacgaagtacttctggatcaggtcagagagggcaaggcccacaatggacaggatgacgaccacgaagtcaaagatgttccagccaacggtgaagtagtactggcgcagggcgagcatcttgagcacgcactcccctgtgaagatgatgatgaagatcatgttgatgttgtacaggatgtccaccttgagctggctctggttgtctgtctccaccatcatggtgaccatgttgaggcagatgaggatcatgatggtgatgtcgaaggcctgcttcgtcacgaggtcatacaccatgccctggatcttgttctggggccggggaattggcttctgaggcttcttggagccaagcttcttcatggcgttatagtatttcttctgttcctccgtcataaagatgtctttcccccctaacttcttcttctgctggttgaagttgtcaatgatgacgccaatgaagaggttgagggtgaagaaggagccaaagatgatgaagatgacaaagtagaggtacatgtagaggttcacctcgtactgcggctgctcctccttctcccgggagtccacggctgcatacatgatgtccatccaacccttgaaggtggccacctgcaggagggagaggtagcccagacccacgttgtcgtagttgaccttgacattgagccagcggacctggcctgtgtgcatgaggctctcgcactcagacttgttgttgacctcggagatgtcgaacctctcagaggtggtggtgttgatgcagtagtagaacttgccggcaaacaggttgacacccatgatgctgaagatcagccagaagatgaggcagacaagcagcacattcatgatggaggggatggcgcctaggagggcgttcaccaccaccctcatgccctcgaatcgggacagtgccctcaggggacgcagggcccgcagtgtccgcagggatttgatgggtcccagctccgagtagcccagccagttggccaccaagctgatgatggagacatccacgatgaggaagtcgagccagcaccaggcgttggtgaagtacaccttaaagccgtaggccacccatttgagcagcatctccatgatgaagatgtaggtgaagaccttgtcggcatattctaggatggtgcgaatgactcgccgctgctcaatgtagatgtcctcgaaggccagagccccactgctgagcaggatcatgaagacaatgaaggtctcgaaccagttgtgctcgacaatcttgaagcaggccctgcgcagagtccaccacttcttcccacggccctgggagatgtccacgtagaggcagggccagcgctgcacgcaggcctcagtgaagcactcctcaggctgctccccctcggggttctcctctgcctgctcctcagggtcctcctcggggggcttgtagtcagctgtgctgcagacggacgagttcccatcatagagaggctgcggcggcttcttgctatcctcaggctctgagaaagtgtcggtttcctcctcggtgggcatctccaggtcggactcctcggaggcgatgggcacctgtatggtcaggtaggggttgttgatgaagttaaggtggtccagctcgaggctggatggggggccgtcagccaggcccatgtggttcaggatgtgattgtccttcttcaggtcctcctcgggcggctccttcttctcatcctcgggggcagtctcccccgcctctccagcctccccggccccgtcagcctccccgaggctgagcatgatgtccttggggctcaggatcttgccatgcagcagccccaggaggaaggccttggcaaagccgatgcccaacttgatgcgcccgatggcaatctgcaggttgttcatctcgccatcctcatccgaggctgccagactgtcggcgctgaaggagctcagcagcagagccaggaacaggttcaggaccacaagattgccgatgaccatgaccatgaggaagacggtgaggcacatggcttggccggccacctccatgcagtcccacatggtctcgatccactccccgcacaggatgcggaagacgatgaggaaggagtggaagaaatcatgcatgtgccagcgcggcaggttgcagtccaaggcaatcttgcacacgcactccttgtagctcttgccaaacagctgcatgcccaccacggcgaagatgaacacgatgatagccagcaccagcgtcaggttacccagcgcccccactgaattgccaatgatcttgatgagcatgttcagcgttggccacgacttggccagcttgaagacccgcagcagacggaaggagcgtagcacagacagtccctgtacgttggccaggcctagctctaccaggctgagggtgacgatgatgctgtcgaagatattccaaccctgctggaaatactcgtaggggtccatggcaatcagcttcagaaccatctctgctgtgaagatgcctgtgaagaccaggttgcccacagtgagcacgttgtcaaagtgctccgtcatggggtaatgttccatggccatgaagagggtgttgagcacgatgcagatggtgatgcccaggtccacgaacgggtccatgacgatcaggtggatgatgttcttgaacttcagccacggggcgcagcagttccatatgagcactttgtgggcgcacttgtaccaccatggtgggcacttttggtgggcctcttccagttcttccatggcgtcggagatgccgctgtctccgctgctgctctgcctcggggctcccttctccccttgcgatgtgtccaggctgccattgcagtctttgccatgggctgggtccccatctgcctccccaccttccagagcttgggcggccttggccttctccagctcctcctggtgctttttgaacttctcaagcatctgctgaaactcctcctctttctccttatcctcggccagggtggcctcattctgctcggcatatgccatggccaccacggccaggatcagattgatgaggtagaaagagcccaggaagatgatgaccacgaagaagatcatgtaggtcttgccagctgctcgaagggtcagctggaagaggttctcccaatagtcctgtgtcatgaggcggaagagagccaagaaggcccagctgaaggtgtcatagctggtgtagccatagttggggttccgcccggtcttgatgcactcataaccctcagggcagtgcccagcatcactgctgttcccacagagcagggcatcgttggagccctccaggaagtagaagttcccttcatcactgatgtaggcgtcccaatcaaaggtatcgttggtggcccagcttgcatggctgttccacgtgtcgttggcataccatgagtcattgccgtaccacatctcattgccataccatgtgtcattgccgtaccacgtgtcattgctgtaccacgtggtgttggtgtcgttgaacggcgggggccagcgcacacacttctgcctcaggtttcccatgaagagctgcagtcctaccagcgcaaagacgctcaggcagaagacagtgaggatcatcacatccgacagctttttcaccgactggatcagggcccccacgatcgtcttcagccctgggatgaccgtgatggttttgagggcccgcagcacccggaaggtcctcagggctgagatgttgcccaagtccacaaactctgtcaggtacgccatcatgatgacactgaagtccagccagttccaggggtcccggaggaatgtgaagtcgtcgacacagaagcctcgggccagtatcttgatgagggactcaaaggtgtagatccctgtgaaggtgtactccacattcttggaccagggaggcgggtcactcatggtcatgaatacgcagttggtcaagatggtgatcatgatgaacatgctgaacagcgcatggatgagcaccttgatggccccgcgcctgactacgctgaaggggctcagcaggtagagagcaggtgtggcggagaagcggaagatggccttgcccttgttgagtacgatgaaggtcttcttattgctgtagtagggatccaggtcctccagggggatgccgatgacctccggcggggggtctccgtagatcatgggtaggttcttgccagcctccaagtcacttcgtggcttccgttcgggctcctcaatctccatctgcttattccgctgcagccgggcctcctcctccaccgcccgctgttctatggctgccagtgactcccgggtgaaggggcgcaagcactcagggcccagaggcaccagggtgcacagagatggtctggccatcctcgcatcctgggctcagagaccagaagggtggtgggtggcctggggagctgcagtgcgcagccccggggtgctgg

SEQ ID NO: 333 - RNA, 6598 nt, Mus musculus
  source 1..6598: mol_type = mRNA
gatggccagctcatctctgcccaccctggtcccccctggtccccactgcctgcgccccttcaccccagagtccctggcagccatagaacagcgggcaatggaggaggaagcccggctgcagcggaacaagcaaatggagattgaagagcctgagcggaagccacgcagtgacctggaagctggcaagaacctcccactcatctatggggaccccccacctgaagtcattggcgtccccctggaggacctggacccttactacagtgacaagaagaccttcattgtgctcaacaaaggaaaggccatcttccgattctctgccacccctgccctctacatgctgagccccttcagcatcgtccggcgggtggctatcaaggtgctcatccacgcgctgttcagcatgttcatcatgatcaccatcttgaccaactgcgtgttcatgaccatgagcaacccgccttcttggtccaaggacgtggagtacaccttcacagggatctacacctttgagtccctcattaagatgctggcccgaggcttttgcattgatgacttcacattcctccgagacccctggaactggctggacttcagtgtcatcacaatggcgtacgtgacagagtttgtggacttgggcaacatctcagccctgaggaccttccgtgtgctgcgggccctgaaaaccatcacggtcatcccagggctgaagacgatcgtgggagccctgatccagtctgtgaaaaagctctcggatgtgatgatcctcactgtcttctgcctgagcgtctttgccctggtggggctgcagcttttcatgggaaacctgcgtcagaagtgcgtgcgttggcccccgcccatgaatgacaccaacaccacgtggtatggtaatgatacgtggtacggcaatgacacctggtacggcaatgacacctggtatggcaatgacacttggaacagccaggagagctgggtcagcaactctacctttgactgggaggcctacatcaatgacgaagggaacttctatttcttggagggctccaatgatgccctgctctgtgggaatagcagtgatgccgggcactgccctgagggctacgaatgcatgaaggctgggaggaaccccaactatggctacaccagctacgacaccttcagctgggccttcctggctctcttccgtctcatgacgcaggactactgggagaaccttttccagctgacccttcgagccgctggcaagacctacatgatcttctttgtggtcatcatcttcctgggttccttctacctcatcaatctgatcctggcggtggtggccatggcatatgctgagcagaatgaggctaccctggccgaagaccaggagaaagaggaggagttccaacagatgcttgaaaaattcaaaaaacatcaggaggaactggaaaaggcgaaggctgcccaggctctggaaggtggagaggaggcagatggggacccaacccacagcaaagactgcaatggtagcctggatacatccggggagaaggggcccccaaggccaagctgcagcgcagagagtgccatctcagatgctatggaggagctggaagaggcccatcagaagtgccccccatggtggtacaagtgtgcacacaaagtgctcatctggaactgctgtgccccgtgggtgaagttcaagcatattatcctcctgattgtcatggacccctttgtggacctgggcatcaccatctgcatcgtgctcaacaccctcttcatggccatggagcactaccccatgactgagcactttgacaacgtgctctctgtgggcaacttggtcttcacgggcatcttcactgcagagatggtgctgaagttgattgctatggacccctacgaatatttccaacagggctggaacatcttcgacagcttcatcgtcaccctcagcctggtggagctgggcctggccaacgtgcagggcctatcagtgctccgttctttccgtctgctgcgtgtcttcaagctggccaagtcatggccaacactcaacatgctcatcaaaatcattggcaactcagtgggtgcgctgggcaacctgaccctggtgttggccatcatcgtcttcatcttcgccgtggtgggcatgcagctgtttggcaagagctataaggaatgcgtgtgcaagattgcctcagactgcagcctgccccgctggcacatgcacgatttcttccactccttcctcatcgtcttccgcatcctctgtggggagtggatcgagaccatgtgggactgcatggaagtggccggccaggccatgtgcctcaccgtcttcctcatggtcatggtcattggcaacctggtggtcctgaatctgttcctggctctcctgttgagttccttcagcgctgacagtctggcagcgtcagatgaagatggtgagatgaacaacctacagatcgccatcgggcgtatcaagtggggcatcgcctttgccaaaaccttcctcttggggctgttgcatggcaagatcctgagcctcaaagacataatgctcagtctcggggagcctgggggtgctggggaaaacggggagagccctcccgaggatgagaagaaggaaccacctccggaagatgggaacaaggagctgaaagacaatcatatcctgaaccacgtgggcctgactgatggaccccgctccagcatcgagatggaccaccttaacttcatcaacaacccctacctcactatccatgtgcccattgcctccgaggagtccgacttggaaatgcccacagaggaggagactgacaccttctcggagcctgaggacatcaagaagccactacagcctctgtacgacgggaactcctccgtctgcagcacagctgactacaagccccccgaagaggaccctgaggagcaggctgaggagaaccctgagggggagctacctgaggagtgtttcacagaggcctgtgtgaagcgctgcccctgcctctatgtggacatctcccagggccgcgggaaaatgtggtggacactccgcagggcctgcttcaagattgttgagcacaactggtttgagaccttcatcgtcttcatgatcttgctcagcagcggggccctggccttcgaggacatctacattgaacagcggcgagtcatccaaaccatcctggaatatgctgacaaggtcttcacctacatcttcatcctggagatgctgctaaagtgggtggcctacggcttcaaggtgtacttcaccaacgcctggtgctggctcgacttcctcattgtggatgtctccatcatcagtctggtggctaactggctgggctactctgagctggggcccatcaaatccctgcgcacgctccgggccctgcgacctctgagggcactgtcccgatttgaaggcatgagggtggtggtgaacgcccttctgggagccatcccttccatcatgaacgtgctccttgtctgcctcatcttctggctcatcttcagcatcatgggggtcaacttgtttgctggaaagttctactactgcatcaacacaaccacctccgagagattcgacatctctgtggtcaacaacaagtccgagtgtgagagcctcatgtacaccggccaggtccgctggatgaacgtcaaggtcaactatgacaacgtgggtctcggctacctctctcttcttcaggtggccactttcaagggttggatggacatcatgtatgcagctgtggactcccgggagaaagaggagcagccagactacgaggtgaacctctacatgtacctttacttcgtcatctttatcatcttcggctccttcttcaccctcaatctcttcattggcgtcatcattgacaacttcaaccaacagaagaagaagtttggagggaaagacatcttcatgacagaggaacagaagaaatactacaatgcgatgaagaagcttggctccaagaagccccagaagccaatcccccggcctcagaacaagatccaaggcatggtgtacgacttcgtgacaaagcaggtgtttgacatctctatcatgatcctcatctgcctcaacatggtgacgatgatggtggagacggatgaccagagccagctcaaggtggacatcctgtataacatcaacatggtcttcattatcgtcttcacaggggagtgtgtgctcaagatgtttgccctgcgccattactacttcaccattggctggaatatcttcgacttcgtggttgtcatcttgtccattgtgggtctcgcactctctgacttgatacagaaatactttgtgtcacccacactgttccgtgtgatccgattggctcggatcgggcgtgtcttgcgtctgatccgtggggccaagggcatccggacgctgctgttcgccctgatgatgtccctgcccgccctcttcaacatcggcctccttctctttctggtcatgttcatttactccatcttcggcatgtctaacttcgcctacgtcaagaaagagtcgggcatcgacgacatgttcaactttgagacctttggcaacagtatcatctgcctcttcgagatcaccacgtcagctggctgggacgggcttctgaaccccatcctcaacagtgggcccccagactgtgacccgacattggagaacccaggcaccaatatcaagggtgactgcggcaacccatccatcggcatctgtttcttctgcagctacatcatcatctccttcctcatcgtggtcaacatgtacattgccatcatcctagagaatttcaatgtggccactgaagagagcagtgagcccctctgtgaggatgacttcgagatgttctatgagacctgggagaagtttgaccccgatgcaactcagttcatcgactacagccgcctttctgactttgtggacaccctgcaggagcccttgaaaattgccaagcccaataagatcaagcttatcacattagacctgcccatggtacccggggacaagatccactgcctggacatcctctttgccctgaccaaagaggtactgggtgactctggggaaatggatgctctcaaacagaccatggaggagaagttcatggcagctaacccctccaaggtctcctatgagcccatcaccaccaccctcaagaggaagcaggaggaggtgtgtgctatcaaaatccagagggcttaccgccgccatctgctgcagcgctctgtgaagcaggcctcttacatgtaccgccacagccaggaaggcaatggcgatggggcccctgagaaggagggattgcttgccaacaccatgaacaagatgtatggctctgagaaagaggacaacggtgtgcagagccagggggagaaagagaaagactcaacagaggatgctggacccaccacggaggtcacagcccccagcagctcggacactgccctgactcctcctcctccttctcctcctccaccatcatcaccaccacaagggcagacagtgcgcccaggggtcaaagagtctcttgtctagagagcagcatcaaggctgcatgcagagttggggaacggggctttgagatggaggagggtggggctctacagggcttgacacctgggctgagggaaatggagattgtgctcagggtcaggtggctctgaagatcccgcctcctgatttaatctttacgatgctctaacattctctcggccagggggaatactgttggtatgaaggggttggtcaccttcctgtcactactttaagagcccaggtcccccagctctagccaggacaaagacaaactttaacccccaaacttacactgaccctagagcttagctactcctctcacccccatgattctgggacacagctccccccacccctcgccggctcaggaatgccctgaaaaggggaaccggttctggtacagaaattgctgcaccaagtcaattggccgctggatccggatgtatcaggctggaaacatgacttctgaaacctttcgcccagtcatatccaggccggtggacagctcccctggctggcccctgggggaagaactgtggaaggattgtcctgaggaatctctagattgcatggatgggtcacacaggctgggtcctgccagctgcattcatgcacttgagcctgagcacccacatctgcctgaggtcaggttggaagctctctaataagactctgtctgttccctcctccttgtctccacgccttcttcctttgaccgccagggctcatgggagccccatcacgcccgagagacctccttcttcctgtttaatctctgcccatctcttccctgtcccttctctgcttcctcaagtgactctgagaatgttagaactcagcacacggggagatatgttgatgctggggcgtgcagtaagaaggctcgctagactcggtctcagtcttcctgctacctggaaagccacttttccccctgagacagggtttcttttctctgtgtatccctggtcatcctggaattcattctgtagatctggctagcctcaaactcagggatccgcccacctctgcctcccacgtgctgaaattaaaggcttgcgccaccactgc

SEQ ID NO: 334 - RNA, 6598 nt, Mus musculus
  source 1..6598: mol_type = mRNA
gcagtggtggcgcaagcctttaatttcagcacgtgggaggcagaggtgggcggatccctgagtttgaggctagccagatctacagaatgaattccaggatgaccagggatacacagagaaaagaaaccctgtctcagggggaaaagtggctttccaggtagcaggaagactgagaccgagtctagcgagccttcttactgcacgccccagcatcaacatatctccccgtgtgctgagttctaacattctcagagtcacttgaggaagcagagaagggacagggaagagatgggcagagattaaacaggaagaaggaggtctctcgggcgtgatggggctcccatgagccctggcggtcaaaggaagaaggcgtggagacaaggaggagggaacagacagagtcttattagagagcttccaacctgacctcaggcagatgtgggtgctcaggctcaagtgcatgaatgcagctggcaggacccagcctgtgtgacccatccatgcaatctagagattcctcaggacaatccttccacagttcttcccccaggggccagccaggggagctgtccaccggcctggatatgactgggcgaaaggtttcagaagtcatgtttccagcctgatacatccggatccagcggccaattgacttggtgcagcaatttctgtaccagaaccggttccccttttcagggcattcctgagccggcgaggggtggggggagctgtgtcccagaatcatgggggtgagaggagtagctaagctctagggtcagtgtaagtttgggggttaaagtttgtctttgtcctggctagagctgggggacctgggctcttaaagtagtgacaggaaggtgaccaaccccttcataccaacagtattccccctggccgagagaatgttagagcatcgtaaagattaaatcaggaggcgggatcttcagagccacctgaccctgagcacaatctccatttccctcagcccaggtgtcaagccctgtagagccccaccctcctccatctcaaagccccgttccccaactctgcatgcagccttgatgctgctctctagacaagagactctttgacccctgggcgcactgtctgcccttgtggtggtgatgatggtggaggaggagaaggaggaggaggagtcagggcagtgtccgagctgctgggggctgtgacctccgtggtgggtccagcatcctctgttgagtctttctctttctccccctggctctgcacaccgttgtcctctttctcagagccatacatcttgttcatggtgttggcaagcaatccctccttctcaggggccccatcgccattgccttcctggctgtggcggtacatgtaagaggcctgcttcacagagcgctgcagcagatggcggcggtaagccctctggattttgatagcacacacctcctcctgcttcctcttgagggtggtggtgatgggctcataggagaccttggaggggttagctgccatgaacttctcctccatggtctgtttgagagcatccatttccccagagtcacccagtacctctttggtcagggcaaagaggatgtccaggcagtggatcttgtccccgggtaccatgggcaggtctaatgtgataagcttgatcttattgggcttggcaattttcaagggctcctgcagggtgtccacaaagtcagaaaggcggctgtagtcgatgaactgagttgcatcggggtcaaacttctcccaggtctcatagaacatctcgaagtcatcctcacagaggggctcactgctctcttcagtggccacattgaaattctctaggatgatggcaatgtacatgttgaccacgatgaggaaggagatgatgatgtagctgcagaagaaacagatgccgatggatgggttgccgcagtcacccttgatattggtgcctgggttctccaatgtcgggtcacagtctgggggcccactgttgaggatggggttcagaagcccgtcccagccagctgacgtggtgatctcgaagaggcagatgatactgttgccaaaggtctcaaagttgaacatgtcgtcgatgcccgactctttcttgacgtaggcgaagttagacatgccgaagatggagtaaatgaacatgaccagaaagagaaggaggccgatgttgaagagggcgggcagggacatcatcagggcgaacagcagcgtccggatgcccttggccccacggatcagacgcaagacacgcccgatccgagccaatcggatcacacggaacagtgtgggtgacacaaagtatttctgtatcaagtcagagagtgcgagacccacaatggacaagatgacaaccacgaagtcgaagatattccagccaatggtgaagtagtaatggcgcagggcaaacatcttgagcacacactcccctgtgaagacgataatgaagaccatgttgatgttatacaggatgtccaccttgagctggctctggtcatccgtctccaccatcatcgtcaccatgttgaggcagatgaggatcatgatagagatgtcaaacacctgctttgtcacgaagtcgtacaccatgccttggatcttgttctgaggccgggggattggcttctggggcttcttggagccaagcttcttcatcgcattgtagtatttcttctgttcctctgtcatgaagatgtctttccctccaaacttcttcttctgttggttgaagttgtcaatgatgacgccaatgaagagattgagggtgaagaaggagccgaagatgataaagatgacgaagtaaaggtacatgtagaggttcacctcgtagtctggctgctcctctttctcccgggagtccacagctgcatacatgatgtccatccaacccttgaaagtggccacctgaagaagagagaggtagccgagacccacgttgtcatagttgaccttgacgttcatccagcggacctggccggtgtacatgaggctctcacactcggacttgttgttgaccacagagatgtcgaatctctcggaggtggttgtgttgatgcagtagtagaactttccagcaaacaagttgacccccatgatgctgaagatgagccagaagatgaggcagacaaggagcacgttcatgatggaagggatggctcccagaagggcgttcaccaccaccctcatgccttcaaatcgggacagtgccctcagaggtcgcagggcccggagcgtgcgcagggatttgatgggccccagctcagagtagcccagccagttagccaccagactgatgatggagacatccacaatgaggaagtcgagccagcaccaggcgttggtgaagtacaccttgaagccgtaggccacccactttagcagcatctccaggatgaagatgtaggtgaagaccttgtcagcatattccaggatggtttggatgactcgccgctgttcaatgtagatgtcctcgaaggccagggccccgctgctgagcaagatcatgaagacgatgaaggtctcaaaccagttgtgctcaacaatcttgaagcaggccctgcggagtgtccaccacattttcccgcggccctgggagatgtccacatagaggcaggggcagcgcttcacacaggcctctgtgaaacactcctcaggtagctccccctcagggttctcctcagcctgctcctcagggtcctcttcggggggcttgtagtcagctgtgctgcagacggaggagttcccgtcgtacagaggctgtagtggcttcttgatgtcctcaggctccgagaaggtgtcagtctcctcctctgtgggcatttccaagtcggactcctcggaggcaatgggcacatggatagtgaggtaggggttgttgatgaagttaaggtggtccatctcgatgctggagcggggtccatcagtcaggcccacgtggttcaggatatgattgtctttcagctccttgttcccatcttccggaggtggttccttcttctcatcctcgggagggctctccccgttttccccagcacccccaggctccccgagactgagcattatgtctttgaggctcaggatcttgccatgcaacagccccaagaggaaggttttggcaaaggcgatgccccacttgatacgcccgatggcgatctgtaggttgttcatctcaccatcttcatctgacgctgccagactgtcagcgctgaaggaactcaacaggagagccaggaacagattcaggaccaccaggttgccaatgaccatgaccatgaggaagacggtgaggcacatggcctggccggccacttccatgcagtcccacatggtctcgatccactccccacagaggatgcggaagacgatgaggaaggagtggaagaaatcgtgcatgtgccagcggggcaggctgcagtctgaggcaatcttgcacacgcattccttatagctcttgccaaacagctgcatgcccaccacggcgaagatgaagacgatgatggccaacaccagggtcaggttgcccagcgcacccactgagttgccaatgattttgatgagcatgttgagtgttggccatgacttggccagcttgaagacacgcagcagacggaaagaacggagcactgataggccctgcacgttggccaggcccagctccaccaggctgagggtgacgatgaagctgtcgaagatgttccagccctgttggaaatattcgtaggggtccatagcaatcaacttcagcaccatctctgcagtgaagatgcccgtgaagaccaagttgcccacagagagcacgttgtcaaagtgctcagtcatggggtagtgctccatggccatgaagagggtgttgagcacgatgcagatggtgatgcccaggtccacaaaggggtccatgacaatcaggaggataatatgcttgaacttcacccacggggcacagcagttccagatgagcactttgtgtgcacacttgtaccaccatggggggcacttctgatgggcctcttccagctcctccatagcatctgagatggcactctctgcgctgcagcttggccttgggggccccttctccccggatgtatccaggctaccattgcagtctttgctgtgggttgggtccccatctgcctcctctccaccttccagagcctgggcagccttcgccttttccagttcctcctgatgttttttgaatttttcaagcatctgttggaactcctcctctttctcctggtcttcggccagggtagcctcattctgctcagcatatgccatggccaccaccgccaggatcagattgatgaggtagaaggaacccaggaagatgatgaccacaaagaagatcatgtaggtcttgccagcggctcgaagggtcagctggaaaaggttctcccagtagtcctgcgtcatgagacggaagagagccaggaaggcccagctgaaggtgtcgtagctggtgtagccatagttggggttcctcccagccttcatgcattcgtagccctcagggcagtgcccggcatcactgctattcccacagagcagggcatcattggagccctccaagaaatagaagttcccttcgtcattgatgtaggcctcccagtcaaaggtagagttgctgacccagctctcctggctgttccaagtgtcattgccataccaggtgtcattgccgtaccaggtgtcattgccgtaccacgtatcattaccataccacgtggtgttggtgtcattcatgggcgggggccaacgcacgcacttctgacgcaggtttcccatgaaaagctgcagccccaccagggcaaagacgctcaggcagaagacagtgaggatcatcacatccgagagctttttcacagactggatcagggctcccacgatcgtcttcagccctgggatgaccgtgatggttttcagggcccgcagcacacggaaggtcctcagggctgagatgttgcccaagtccacaaactctgtcacgtacgccattgtgatgacactgaagtccagccagttccaggggtctcggaggaatgtgaagtcatcaatgcaaaagcctcgggccagcatcttaatgagggactcaaaggtgtagatccctgtgaaggtgtactccacgtccttggaccaagaaggcgggttgctcatggtcatgaacacgcagttggtcaagatggtgatcatgatgaacatgctgaacagcgcgtggatgagcaccttgatagccacccgccggacgatgctgaaggggctcagcatgtagagggcaggggtggcagagaatcggaagatggcctttcctttgttgagcacaatgaaggtcttcttgtcactgtagtaagggtccaggtcctccagggggacgccaatgacttcaggtggggggtccccatagatgagtgggaggttcttgccagcttccaggtcactgcgtggcttccgctcaggctcttcaatctccatttgcttgttccgctgcagccgggcttcctcctccattgcccgctgttctatggctgccagggactctggggtgaaggggcgcaggcagtggggaccaggggggaccagggtgggcagagatgagctggccatc

SEQ ID NO: 335 - RNA, 6959 nt, Rattus norvegicus
  source 1..6959: mol_type = mRNA
acggcacccggggctcgtccgccaccgctcttctctgcttctggccaacagctgaagtcacgcagttcctggagtctgaacccaggagacagttcgggacactggggcgttggccccaagctcctcaggctggagaagatctggttcactttctgttgatcccgaaggtggcacaatctattgctgagaagagaacactgcggggcctggagtgggggaatgcaccgtgcccagtgtcctgggcatcagcacgcccaggtcttgcaggcacatctcccagccccaacaagaccaggacacccacctccctgacccaactcctgggcaggcagagagtgaggagtacacagtagaccccgggcattggtgaccacccaaaacccaagggctgcgggctgtagcggctctgttacctaccaccctctggcccctgagcccagaatgcaaggatggccagctcatctctgcccaacctggtccccccgggtccccactgcctgcgccccttcaccccagagtccctggcagccatagagcagcgggcggtggaggaggaggcccggctgcagcggaacaagcagatggagattgaggagcctgagcggaagccacgcagtgacctggaagctggcaagaacctcccactcatctatggggaccccccacccgaagtcattggcatccccctggaggacctggatccttactacagtgacaagaagaccttcattgtgctcaacaaaggaaaggccatcttccgattctctgccacgcctgccctctacctgctgagccccttcagcatcgtcaggagggtggctatcaaggtgctcattcacgcgctgttcagcatgtttatcatgatcaccatcctgaccaactgtgtgttcatgaccatgagcaatccgccttcttggtccaaacacgtggagtacaccttcacggggatctatacctttgagtccctcattaagatgctggcccgaggcttttgcattgatgacttcacattcctccgagacccctggaactggctggacttcagtgtcatcacaatggcgtatgtgacagagtttgtggacttgggcaacatctcagccctgaggaccttccgtgtgctgcgggccctgaagaccatcacggttatcccagggctgaagacaattgtgggagccctgatccagtctgtgaaaaagctgtcggatgtgatgatcctcactgtcttctgcctgagtgtctttgccctggtggggctgcagcttttcatgggaaacctgcgtcagaagtgcgtgcgttggcccccgcccatgaatgacaccaacaccacgtggtatggcaatgacacttggtacagcaatgacacttggtacggcaatgacacttggtacatcaatgacacttggaacagccaggagagctgggccggcaactctacctttgactgggaggcctacatcaatgacgaagggaacttctatttcttggagggctccaatgatgctctgctctgtgggaatagcagtgatgctgggcactgccctgagggctacgaatgcataaaggctgggcggaaccccaactatggctacaccagctatgacaccttcagctgggctttcctggctctcttccggctcatgacgcaggactactgggagaaccttttccagctgaccctacgagctgctggcaagacctacatgatcttcttcgtggtcatcatcttcctgggctccttctacctcatcaatctgatcctggccgtggtggccatggcgtacgctgagcagaatgaggctaccctggccgaagaccaggagaaagaggaggagttccaacagatgcttgagaaatacaaaaaacatcaggaggaagtggaaaaggctaaggctgcccaggctctggaaagtggagaggaggcagatggggacccaacccacaacaaagactgcaatgggagcctggatgcatccggggagaaggggcccccaaggccaagctgcagcgcagacagtgccatctcagatgctatggaggagctggaagaggcccatcagaagtgcccaccgtggtggtacaagtgtgcacacaaagtcctcatctggaactgctgtgccccgtgggtgaagttcaaacatataatctacctgatcgtcatggacccctttgtggacctgggtatcaccatctgcattgtgctcaacaccctcttcatggccatggagcactaccccatgaccgagcactttgacaacgtgctctccgtgggcaacttggtcttcacaggcatcttcactgcggagatggtgttgaagctgattgccatggacccctacgagtatttccaacagggctggaacatctttgacagtttcatcgtcaccctcagcctggtggagctgggcctggccaacgtacaggggctgtcagtgctccgttccttccgcctgctgcgtgtcttcaagctggccaagtcatggccaacactcaacatgctcatcaaaatcattggcaactcagtgggcgcgctgggcaacctgaccctggtgctggccatcatcgtcttcatcttcgccgtggtgggcatgcagctgttcggcaagagctataaggagtgtgtgtgcaagatcgcctcagactgcaacctgcctcgctggcacatgaacgacttcttccactccttcctcatcgtcttccgcatcctctgcggggaatggatcgagaccatgtgggactgcatggaggtggccggccaggccatgtgcctcaccgtcttcctcatggtcatggtcattggcaacctggtggtcctgaatctgttcctggctctcctgctgagttccttcagtgctgacagcctggcggcctcggatgaggatggcgagatgaacaacctacagattgccatcgggcgtatcaagtggggcatcggttttgccaaaaccttcctcctggggctgttgcgtggcaagatcctgagccccaaggaaataatactcagcctcggtgagcccgggggtgccggggaaaatgccgaggagagtactcccgaggatgagaagaaggagccgccaccggaagataaggagctgaaagacaatcatatcctgaaccacgtgggcctgaccgatggcccccgctccagcatcgagctggaccaccttaacttcatcaacaacccctacctcaccatccacgtgcccattgcctccgaggagtctgacctggagatgcccacagaggaggagacagacgccttctcggagcctgaggatatcaagaagcccctacagcccctctacgacgggaactcctccgtctgcagcacagctgactacaagccccctgaagaggaccccgaggagcaggctgaggagaaccccgagggggagcagcctgaggaatgcttcacggaagcctgtgtgaagcgctgcccctgcctctatgtggacatctcccagggccgtgggaaaatgtggtggacactgcgcagggcctgtttcaagattgttgagcacaactggtttgagaccttcattgtcttcatgatcttgctcagcagtggagccctggccttcgaagacatctacattgaacagcgacgagtcatccgcaccatcctggaatacgccgacaaggtcttcacctacatcttcatcctggagatgttgctaaagtgggtcgcctacggcttcaaggtgtatttcaccaatgcctggtgctggctcgacttcctcatcgtggacgtctccatcatcagcctggtggcaaactggctgggctactctgagctggggcccatcaaatccctgcgcacactccgggccctgcgacctctgagggcactgtctcgatttgagggtatgagggtggtggtgaacgccctcctgggagctatcccctccatcatgaacgtcctcctcgtctgcctcatcttctggctcatcttcagcatcatgggggtcaacttgtttgctggaaagttctactactgcgtcaacaccaccacctctgagagattcgacatctcggtggtcaacaacaagtccgagtgtgagagcctcatgtatacaggccaggtccgctggatgaatgtcaaggtcaactacgacaacgtgggtctgggctatctctccctccttcaggtggccacattcaagggttggatggatatcatgtatgcagctgtggactcccgggagaaagaggagcagccagactatgaggtgaacctctacatgtacctctacttcgtcatcttcatcatcttcggctccttcttcaccctcaacctcttcatcggtgtcatcatcgacaacttcaaccaacagaagaagaagtttggagggaaagacatcttcatgacagaggaacagaagaaatactacaacgcgatgaagaagcttggctccaagaagccccagaagccaattccccggcctcagaacaagatccagggcatggtgtacgacttcgtgacgaagcaggtgtttgacatctccatcatgatcctcatctgcctcaacatggttactatgatggtggagacagatgaccagagccagctcaaggtggacatcctgtacaacatcaacatggtcttcattatcatcttcacaggggagtgtgtgctgaagatgtttgccctacgccattactacttcaccattggctggaacatctttgactttgtggttgtcatcttgtccatcgtgggccttgcgctctctgacttgatacagaaatactttgtgtcacccacgctgttccgtgtgatccgcttggctcggatcgggcgtgtcctgcgtctgatccgcggggccaagggcatccggacgctgctgttcgccctgatgatgtccctgcccgccctcttcaacatcggcctccttctctttctggtcatgttcatctactcgatcttcggcatgtctaacttcgcctacgtcaagaaagagtcaggcatcgacgacatgtttaactttgagacctttggcaacagtatcatctgcctcttcgagatcaccacgtcagccggctgggacgggcttctgaaccccatcctcaacagtgggcccccagactgtgacccgacgttggagaacccgggtaccaatgtcaggggggactgcggcaacccttccatcggcatctgtttcttctgcagctacatcatcatctccttcctcatcgtggtcaacatgtacattgctatcatcctggagaatttcaacgtggccaccgaagagagcagcgagcccctcagtgaggatgacttcgagatgttctatgagacctgggagaagttcgacccggacgccactcagttcatcgactacagccgcctctcggactttgtggacaccctgcaggagccgctgaaaatcgccaaacccaataagatcaagcttatcacgttagacctgcccatggtgcccggcgacaagatccactgcttggacatcctctttgccctgaccaaagaggtactgggtgactctggggagatggacgccctcaagcagaccatggaggagaagtttatggcagctaacccttccaaggtctcctatgagcccatcaccaccaccctcaagaggaagcaggaggaggtgtgtgctatcaaaatccagagggcctaccgccgccacctgctgcagcgctccgtgaagcaggcctcttacatgtaccgtcacagccaggacggcaatggcgacggggcccccgagaaggagggattgcttgccaacaccatgaacaagatgtatggccatgagaaagagggtgatggtgtgcagagccagggggaggaagagaaggcctctacagaggatgctggacccaccgtggagcccaaacccaccagcagctcagatactgccctgactccttctcctccaccactacccccctcatcatcaccgccacaagggcagacagttcgcccaggggtcaaagagtctcttgtctagatggcagcgtcaaggctgcacgcagagttggaggggaagggctttgagatgggggctatacaggacttgacacctgggctgaggggtatggaaattgtgctcagggttcaggtgggtcggaagcccctgctgcctgatttcatctttacgatgctctgacattctgttggccaggggaggccaggacatctgaatgctgtttccttcttgggggagagccagcataccttggaggggttggccaccttcctgtcactactttaagggcccaggaccccagctctagccaagacaaagacgaatcttaacccccaaacctacacctgacccccagagcttagctatccctctcgcccccataattctagggtgcagcttccccctgacagctcaggaatgccctgtaaaaggggaaatggttctggtacagaaccaattggccgctggatccggatgtatcaggctggaaacatgacttctgaaacctttcacccagtcagatccaggccggtgggcagctcccctggctggcccctgggggaagaactaaggaaggattgccctgagaaattacctttctctagattgcgtggatgggtcaaacaggctgggtcctgccagctgcattcatgcccttgagcctgagcgcccacatctgcctggggtcaggttggaagctctctatcaagaatctgcccgttcccgcctccctgccttctttctttgaataccagggctcctgggagccccatcaaacacgaaagactgccttcctcctgtctaatctctgcccccccccttccctgccccttccctgcttcctcaagtgactctgagaatgctagaactcagcacacgggagatgagttgatactggggcatgcagtgagaaggctcaccaggcttggctttggtcttctcattgcctgaaagcaagttttcccctgagacagggtttcttttctccgtgtagccctggctgcctgg

SEQ ID NO: 336 - RNA, 6959 nt, Rattus norvegicus
  source 1..6959: mol_type = mRNA
ccaggcagccagggctacacggagaaaagaaaccctgtctcaggggaaaacttgctttcaggcaatgagaagaccaaagccaagcctggtgagccttctcactgcatgccccagtatcaactcatctcccgtgtgctgagttctagcattctcagagtcacttgaggaagcagggaaggggcagggaagggggggggcagagattagacaggaggaaggcagtctttcgtgtttgatggggctcccaggagccctggtattcaaagaaagaaggcagggaggcgggaacgggcagattcttgatagagagcttccaacctgaccccaggcagatgtgggcgctcaggctcaagggcatgaatgcagctggcaggacccagcctgtttgacccatccacgcaatctagagaaaggtaatttctcagggcaatccttccttagttcttcccccaggggccagccaggggagctgcccaccggcctggatctgactgggtgaaaggtttcagaagtcatgtttccagcctgatacatccggatccagcggccaattggttctgtaccagaaccatttccccttttacagggcattcctgagctgtcagggggaagctgcaccctagaattatgggggcgagagggatagctaagctctgggggtcaggtgtaggtttgggggttaagattcgtctttgtcttggctagagctggggtcctgggcccttaaagtagtgacaggaaggtggccaacccctccaaggtatgctggctctcccccaagaaggaaacagcattcagatgtcctggcctcccctggccaacagaatgtcagagcatcgtaaagatgaaatcaggcagcaggggcttccgacccacctgaaccctgagcacaatttccatacccctcagcccaggtgtcaagtcctgtatagcccccatctcaaagcccttcccctccaactctgcgtgcagccttgacgctgccatctagacaagagactctttgacccctgggcgaactgtctgcccttgtggcggtgatgatgaggggggtagtggtggaggagaaggagtcagggcagtatctgagctgctggtgggtttgggctccacggtgggtccagcatcctctgtagaggccttctcttcctccccctggctctgcacaccatcaccctctttctcatggccatacatcttgttcatggtgttggcaagcaatccctccttctcgggggccccgtcgccattgccgtcctggctgtgacggtacatgtaagaggcctgcttcacggagcgctgcagcaggtggcggcggtaggccctctggattttgatagcacacacctcctcctgcttcctcttgagggtggtggtgatgggctcataggagaccttggaagggttagctgccataaacttctcctccatggtctgcttgagggcgtccatctccccagagtcacccagtacctctttggtcagggcaaagaggatgtccaagcagtggatcttgtcgccgggcaccatgggcaggtctaacgtgataagcttgatcttattgggtttggcgattttcagcggctcctgcagggtgtccacaaagtccgagaggcggctgtagtcgatgaactgagtggcgtccgggtcgaacttctcccaggtctcatagaacatctcgaagtcatcctcactgaggggctcgctgctctcttcggtggccacgttgaaattctccaggatgatagcaatgtacatgttgaccacgatgaggaaggagatgatgatgtagctgcagaagaaacagatgccgatggaagggttgccgcagtcccccctgacattggtacccgggttctccaacgtcgggtcacagtctgggggcccactgttgaggatggggttcagaagcccgtcccagccggctgacgtggtgatctcgaagaggcagatgatactgttgccaaaggtctcaaagttaaacatgtcgtcgatgcctgactctttcttgacgtaggcgaagttagacatgccgaagatcgagtagatgaacatgaccagaaagagaaggaggccgatgttgaagagggcgggcagggacatcatcagggcgaacagcagcgtccggatgcccttggccccgcggatcagacgcaggacacgcccgatccgagccaagcggatcacacggaacagcgtgggtgacacaaagtatttctgtatcaagtcagagagcgcaaggcccacgatggacaagatgacaaccacaaagtcaaagatgttccagccaatggtgaagtagtaatggcgtagggcaaacatcttcagcacacactcccctgtgaagatgataatgaagaccatgttgatgttgtacaggatgtccaccttgagctggctctggtcatctgtctccaccatcatagtaaccatgttgaggcagatgaggatcatgatggagatgtcaaacacctgcttcgtcacgaagtcgtacaccatgccctggatcttgttctgaggccggggaattggcttctggggcttcttggagccaagcttcttcatcgcgttgtagtatttcttctgttcctctgtcatgaagatgtctttccctccaaacttcttcttctgttggttgaagttgtcgatgatgacaccgatgaagaggttgagggtgaagaaggagccgaagatgatgaagatgacgaagtagaggtacatgtagaggttcacctcatagtctggctgctcctctttctcccgggagtccacagctgcatacatgatatccatccaacccttgaatgtggccacctgaaggagggagagatagcccagacccacgttgtcgtagttgaccttgacattcatccagcggacctggcctgtatacatgaggctctcacactcggacttgttgttgaccaccgagatgtcgaatctctcagaggtggtggtgttgacgcagtagtagaactttccagcaaacaagttgacccccatgatgctgaagatgagccagaagatgaggcagacgaggaggacgttcatgatggaggggatagctcccaggagggcgttcaccaccaccctcataccctcaaatcgagacagtgccctcagaggtcgcagggcccggagtgtgcgcagggatttgatgggccccagctcagagtagcccagccagtttgccaccaggctgatgatggagacgtccacgatgaggaagtcgagccagcaccaggcattggtgaaatacaccttgaagccgtaggcgacccactttagcaacatctccaggatgaagatgtaggtgaagaccttgtcggcgtattccaggatggtgcggatgactcgtcgctgttcaatgtagatgtcttcgaaggccagggctccactgctgagcaagatcatgaagacaatgaaggtctcaaaccagttgtgctcaacaatcttgaaacaggccctgcgcagtgtccaccacattttcccacggccctgggagatgtccacatagaggcaggggcagcgcttcacacaggcttccgtgaagcattcctcaggctgctccccctcggggttctcctcagcctgctcctcggggtcctcttcagggggcttgtagtcagctgtgctgcagacggaggagttcccgtcgtagaggggctgtaggggcttcttgatatcctcaggctccgagaaggcgtctgtctcctcctctgtgggcatctccaggtcagactcctcggaggcaatgggcacgtggatggtgaggtaggggttgttgatgaagttaaggtggtccagctcgatgctggagcgggggccatcggtcaggcccacgtggttcaggatatgattgtctttcagctccttatcttccggtggcggctccttcttctcatcctcgggagtactctcctcggcattttccccggcacccccgggctcaccgaggctgagtattatttccttggggctcaggatcttgccacgcaacagccccaggaggaaggttttggcaaaaccgatgccccacttgatacgcccgatggcaatctgtaggttgttcatctcgccatcctcatccgaggccgccaggctgtcagcactgaaggaactcagcaggagagccaggaacagattcaggaccaccaggttgccaatgaccatgaccatgaggaagacggtgaggcacatggcctggccggccacctccatgcagtcccacatggtctcgatccattccccgcagaggatgcggaagacgatgaggaaggagtggaagaagtcgttcatgtgccagcgaggcaggttgcagtctgaggcgatcttgcacacacactccttatagctcttgccgaacagctgcatgcccaccacggcgaagatgaagacgatgatggccagcaccagggtcaggttgcccagcgcgcccactgagttgccaatgattttgatgagcatgttgagtgttggccatgacttggccagcttgaagacacgcagcaggcggaaggaacggagcactgacagcccctgtacgttggccaggcccagctccaccaggctgagggtgacgatgaaactgtcaaagatgttccagccctgttggaaatactcgtaggggtccatggcaatcagcttcaacaccatctccgcagtgaagatgcctgtgaagaccaagttgcccacggagagcacgttgtcaaagtgctcggtcatggggtagtgctccatggccatgaagagggtgttgagcacaatgcagatggtgatacccaggtccacaaaggggtccatgacgatcaggtagattatatgtttgaacttcacccacggggcacagcagttccagatgaggactttgtgtgcacacttgtaccaccacggtgggcacttctgatgggcctcttccagctcctccatagcatctgagatggcactgtctgcgctgcagcttggccttgggggccccttctccccggatgcatccaggctcccattgcagtctttgttgtgggttgggtccccatctgcctcctctccactttccagagcctgggcagccttagccttttccacttcctcctgatgttttttgtatttctcaagcatctgttggaactcctcctctttctcctggtcttcggccagggtagcctcattctgctcagcgtacgccatggccaccacggccaggatcagattgatgaggtagaaggagcccaggaagatgatgaccacgaagaagatcatgtaggtcttgccagcagctcgtagggtcagctggaaaaggttctcccagtagtcctgcgtcatgagccggaagagagccaggaaagcccagctgaaggtgtcatagctggtgtagccatagttggggttccgcccagcctttatgcattcgtagccctcagggcagtgcccagcatcactgctattcccacagagcagagcatcattggagccctccaagaaatagaagttcccttcgtcattgatgtaggcctcccagtcaaaggtagagttgccggcccagctctcctggctgttccaagtgtcattgatgtaccaagtgtcattgccgtaccaagtgtcattgctgtaccaagtgtcattgccataccacgtggtgttggtgtcattcatgggcgggggccaacgcacgcacttctgacgcaggtttcccatgaaaagctgcagccccaccagggcaaagacactcaggcagaagacagtgaggatcatcacatccgacagctttttcacagactggatcagggctcccacaattgtcttcagccctgggataaccgtgatggtcttcagggcccgcagcacacggaaggtcctcagggctgagatgttgcccaagtccacaaactctgtcacatacgccattgtgatgacactgaagtccagccagttccaggggtctcggaggaatgtgaagtcatcaatgcaaaagcctcgggccagcatcttaatgagggactcaaaggtatagatccccgtgaaggtgtactccacgtgtttggaccaagaaggcggattgctcatggtcatgaacacacagttggtcaggatggtgatcatgataaacatgctgaacagcgcgtgaatgagcaccttgatagccaccctcctgacgatgctgaaggggctcagcaggtagagggcaggcgtggcagagaatcggaagatggcctttcctttgttgagcacaatgaaggtcttcttgtcactgtagtaaggatccaggtcctccagggggatgccaatgacttcgggtggggggtccccatagatgagtgggaggttcttgccagcttccaggtcactgcgtggcttccgctcaggctcctcaatctccatctgcttgttccgctgcagccgggcctcctcctccaccgcccgctgctctatggctgccagggactctggggtgaaggggcgcaggcagtggggacccggggggaccaggttgggcagagatgagctggccatccttgcattctgggctcaggggccagagggtggtaggtaacagagccgctacagcccgcagcccttgggttttgggtggtcaccaatgcccggggtctactgtgtactcctcactctctgcctgcccaggagttgggtcagggaggtgggtgtcctggtcttgttggggctgggagatgtgcctgcaagacctgggcgtgctgatgcccaggacactgggcacggtgcattcccccactccaggccccgcagtgttctcttctcagcaatagattgtgccaccttcgggatcaacagaaagtgaaccagatcttctccagcctgaggagcttggggccaacgccccagtgtcccgaactgtctcctgggttcagactccaggaactgcgtgacttcagctgttggccagaagcagagaagagcggtggcggacgagccccgggtgccgt

SEQ ID NO: 337 - RNA, 6061 nt, Macaca fascicularis
  source 1..6061: mol_type = mRNA
gcagctgtcctcgccggcccggccccccagccaagtcccccagagttccagccccagcctgaggtgggcacggcgctctgggcttgtcagcaaccgctctgctcccgtccaatagctgaagccacacagttcctggagcttgagcccaggaggcagtcgaaggcacgagggtgttggtcccaagtcccaaggccacaaagaatctggttggtttgccgtcggtcctgggggcggcccctgccactgctggggaaagcgtggtgtggggccaggggtgatgctctgtgcccagcacccgtgtagcagcagcacctgggccttgcaggtacatctcccagtcccgacagagcctgcacgcccacctccccggctcagccactgggcaagcaggaggtgaggagtggacggccggcccagggaggggcggccgcccagcactccagggctgcgcactgcagctcccctggccactcaccaccctcctggtctctgagcccaggatgcgaggatggccagaccatctctgtgcaccctggtgcctctgggccctgattgcttgcgccccttcacccgggagtccctggcagccatagaacagcgggcggtggaggaggaagcccggctgcagcggaacaagcagatggagatcgaggagcccgaacggaagccacgaagtgacttggaggctggcaagaacctacctatgatctatggggaccccccaccggaggtcatcggcatccccctggaggacctggatccctactacagtgacaagaagaccttcatcgtactcaacaagggcaaggccatcttccgcttctccgccacacccgctctctacctgctgagccccttcagcctggtcaggcgtggggccatcaaggtgctcatccacgcgctgttcagcatgttcatcatgatcaccatcttgaccaactgcgtcttcatgaccatgagtgacccgcctccctggtccaagaatgtggagtacaccttcacggggatctacacctttgagtctctcatcaagatactggcccgaggcttctgtgtcgacgacttcacattcctccgggacccctggaactggctggacttcagcgtcatcatgatggcgtacctgacagagtttgtggacttgggcaacatctcagccttgaggaccttccgggtgctgcgggccctcaaaaccatcacggtcatcccagggctaaagacgattgtgggggccctgatccagtcggtgaaaaagctgtcagatgtgatgatcctcactgtcttctgcctgagcgtctttgcgctggtgggactgcagctcttcatgggaaacctgaggcagaagtgtgtgcgctggcccccgccgttcaacgacaccaacaccacgtggtacagtaatgacacgtggtacggcaatgacacatggtatggcaatgagatgtggtatggcaatgactcatggtatgccaacgacacgtggaacagccatgcaagctgggccaccaacgatacctttgactgggacgcctacatcaatgatgaagggaacttctacttcctggagggctccagcgatgccctactctgtgggaacagcagtgatgctgggcactgccccgagggttatgagtgcatcaagaccgggcggaaccccaactatggctacaccagctacgacaccttcagctgggccttcctggctctcttccgcctcatgacacaggactattgggagaacctcttccagctgacccttcgagcagctggcaagacctacatgatcttcttcgtggtcatcatcttcctgggctctttctacctcatcaatctgatcctggccgtggtagccatggcgtatgccgagcagaacgaggccaccctggccgaggataaggagaaagaggaggagtttcagcagatgctcgagaagttcaaaaagcaccaggaggagctggagaaggccaaggccgcccaagctctggaaggtggggaggcagatggggacccagcccatggcaaagactgcaatggcagcctggacgcatcgccagggcagaagggagccccaaggcagagcggcagcggagacagcggcatctctgatgccatggaagaactggaagaggcccaccagaagtgcccaccatggtggtacaagtgcgcccacaaagtgctcatatgggactgctgcgccccgtggatgaagttcaagaacatcatccacctgatcgtcatggacccgttcgtggacctgggcatcaccatctgcatcgtgctcaacaccctcttcatggccatggaacattaccccatgacggagcactttgaccacgtgctcactgtgggcaacctggtcttcacaggcatcttcacagcagagatggttctgaagctgatcgcaatggacccctatgagtatttccagcagggctggaatatcttcgacagcatcatcgtcaccctcagcctggtagagctaggcctggccaacgtacagggactgtctgtgctccgctccttccgtctgctgcgggtcttcaagctggccaagtcatggccgacgctgaacatgctcatcaagatcattggcaactctgtgggggcgctgggcaacctgacgctggtgctggccatcatcgtgttcatcttcgccgtggtgggcatgcagctgtttggcaagagctacaaggattgcgtgtgcaagatcgccttggactgcagcctgcctcgctggcacatgtatgatttcttccactccttcctcatcgtcttccgcatcctgtgcggggagtggatcgagaccatgtgggactgcatggaggtggctggccaagccatgtgcctcaccgtcttcctcatggtcatggtcatcggcaacctcgtggtcctgaacctgttcctggctctgctgctgagctccttcagcgccgacagtctggcagcctcggatgaggacggtgagatgaacaacctgcagattgccatcgggcgcatcaagttgggcatcagctttgccaaggccttcctcctggggctgctgcatggcaagatcctgagccccaaggacatcatgctcagcctcggggagcctgtcggggccggggaggctggagaggccggggagactgcccccgtggatgagaagaaggagccgcccgaggaggacctgaagaaggacagtcacatcctgaaccacatgagcctggctgatgacccaccatccagcatcgagctggaccaccttaacttcatcaacaacccctacctgaccatacaggtgcccatcgcctctgaggagtccgacctggagatgcccaccgaggaggaaacagacactttctcggagcctgaggatagcaagaagccgccgcagcccctctatgatgggaactcctccgtctgcagcacagctgactacaagccccccgaggaggaccctgaggagcaggcagaggagaaccccgagggggagcagcctgaggagtgcttcaccgaggcctgtgtgcagcgctggccctgcctctacgtggacatctctcagggccgcgggaagaagtggtggactctgcgcagggcctgcttcaagatcgtcgagcacaattggttcgagaccttcattgtcttcatgatcctgctcagcagcggggctctggccttcgaggacatctacatcgagcagcggcgagtcatccgcaccatcctcgaatatgctgacaaggtcttcacctacatcttcatcatggagatgctgctcaaatgggtggcctacggctttaaggtgtacttcaccaacgcctggtgctggctcgacttcctcatcgtggatgtctccatcatcagcttggtggccaactggctgggctactcggagctgggacccatcaaatccctgcggacactgcgggccctgcgtcccctgagggcactgtcccgattcgagggcatgagggtggtggtgaacgccctcctgggcgccatcccctccatcatgaacgtgctgctcgtctgcctcatcttctggctgatcttcagcatcatgggtgtcaacctgtttgctggcaagttctactactgcatcaacaccaccacctctgagaggttcgacatctccgaggtcaacaacaagtctgagtgcgagagcctcatgcacacgggccaggtccgctggctcaacgtcaaggtcaactacgacaacgtgggcctgggctatctctccctcctgcaggtggccaccttcaagggttggatggacatcatgtatgcagccgtggactcccgggagaaggaggagcagccgcagtacgaggtgaacctctacatgtacctctactttgtcatcttcatcatcttcggctccttcttcaccctcaacctcttcattggtgtcatcattgacaacttcaaccagcagaagaagaagtttggagggaaagacatctttatgacggaggaacagaagaaatactataacgccatgaagaagcttggctccaagaagcctcagaaaccaattccccggccccagaacaagatccagggcatggtgtatgacctcgtgacgaagcaggccttcgacatcaccatcatgatcctcatctgcctcaacatggtcaccatgatggtggagacagacgaccagagccagctcaaggtggacatcctgtacaacatcaacatgatcttcatcatcatcttcacaggggagtgcgtgctcaagatgctcgccctgcgccagtactacttcaccgtcggctggaacatcttcgacttcgtggtcgtcatcctgtccattgtgggccttgcactctccgacctgatccagaagtacttcgtgtcacccacactgttccgtgtgatccgcctggcgcggatcgggcgtgtcctgcgactgatccgtggggccaagggcatccggacgctgctgttcgccctcatgatgtcgctgcctgccctcttcaacatcggcctcctcctcttcctggtcatgttcatctactccatctttggcatgtccaactttgcctatgtcaagaaggagtcgggcatcgatgatatgttcaacttcgagaccttcggcaacagcatcatctgcctgtttgagatcaccacgtcggctggctgggatgggctcctcaaccccatcctcaacagcgggcccccagactgtgaccccaacctggagaacccgggcaccagtgtcaagggtgactgcggcaacccctccatcggcatctgcttcttctgcagctacatcatcatctccttcctcatcgtggtcaacatgtacatcgccatcatcctggagaacttcaacgtggccacagaggagagcagcgagccccttggtgaggatgactttgagatgttctacgagacatgggagaagttcgacccggatgccacccagttcattgcctacagccgcctctcggactttgtggacaccctgcaggaaccgctgaggatcgccaagcccaacaagatcaagctcatcacgctggacctgcccatggtgccgggggacaagatccactgcctggacatcctctttgccctgaccaaagaggtcctgggtgactctggggaaatggacgccctcaagcagaccatggaggagaagttcatggcagccaacccctccaaggtgtcctacgagcccatcaccaccaccctcaagaggaagcacgaggaggtgtgcgccatcaagatccagagggcctaccgccggcacctgctacagcgctccgtgaagcaggcatcctacatgtaccgccacagccacgacggcagcggggacaacgcccctgagaaggaggggctgcttgccaacaccatgagcaagatgtatggccacgagaacgggaacagcagctcgcagagcccagaggagaagggcgaggcaggggatgccataccaactatggggctgatgcccatcagcccctcagacactgcccagcctcccacctctcccccggggcatatagtgcgcccaggcgtcaaggagtctcttgtctagcaggcagcatcgaggtggccctctgagtctcagcacagtccc

SEQ ID NO: 338 - RNA, 6061 nt, Macaca fascicularis
  source 1..6061: mol_type = mRNA
gggactgtgctgagactcagagggccacctcgatgctgcctgctagacaagagactccttgacgcctgggcgcactatatgccccgggggagaggtgggaggctgggcagtgtctgaggggctgatgggcatcagccccatagttggtatggcatcccctgcctcgcccttctcctctgggctctgcgagctgctgttcccgttctcgtggccatacatcttgctcatggtgttggcaagcagcccctccttctcaggggcgttgtccccgctgccgtcgtggctgtggcggtacatgtaggatgcctgcttcacggagcgctgtagcaggtgccggcggtaggccctctggatcttgatggcgcacacctcctcgtgcttcctcttgagggtggtggtgatgggctcgtaggacaccttggaggggttggctgccatgaacttctcctccatggtctgcttgagggcgtccatttccccagagtcacccaggacctctttggtcagggcaaagaggatgtccaggcagtggatcttgtcccccggcaccatgggcaggtccagcgtgatgagcttgatcttgttgggcttggcgatcctcagcggttcctgcagggtgtccacaaagtccgagaggcggctgtaggcaatgaactgggtggcatccgggtcgaacttctcccatgtctcgtagaacatctcaaagtcatcctcaccaaggggctcgctgctctcctctgtggccacgttgaagttctccaggatgatggcgatgtacatgttgaccacgatgaggaaggagatgatgatgtagctgcagaagaagcagatgccgatggaggggttgccgcagtcacccttgacactggtgcccgggttctccaggttggggtcacagtctgggggcccgctgttgaggatggggttgaggagcccatcccagccagccgacgtggtgatctcaaacaggcagatgatgctgttgccgaaggtctcgaagttgaacatatcatcgatgcccgactccttcttgacataggcaaagttggacatgccaaagatggagtagatgaacatgaccaggaagaggaggaggccgatgttgaagagggcaggcagcgacatcatgagggcgaacagcagcgtccggatgcccttggccccacggatcagtcgcaggacacgcccgatccgcgccaggcggatcacacggaacagtgtgggtgacacgaagtacttctggatcaggtcggagagtgcaaggcccacaatggacaggatgacgaccacgaagtcgaagatgttccagccgacggtgaagtagtactggcgcagggcgagcatcttgagcacgcactcccctgtgaagatgatgatgaagatcatgttgatgttgtacaggatgtccaccttgagctggctctggtcgtctgtctccaccatcatggtgaccatgttgaggcagatgaggatcatgatggtgatgtcgaaggcctgcttcgtcacgaggtcatacaccatgccctggatcttgttctggggccggggaattggtttctgaggcttcttggagccaagcttcttcatggcgttatagtatttcttctgttcctccgtcataaagatgtctttccctccaaacttcttcttctgctggttgaagttgtcaatgatgacaccaatgaagaggttgagggtgaagaaggagccgaagatgatgaagatgacaaagtagaggtacatgtagaggttcacctcgtactgcggctgctcctccttctcccgggagtccacggctgcatacatgatgtccatccaacccttgaaggtggccacctgcaggagggagagatagcccaggcccacgttgtcgtagttgaccttgacgttgagccagcggacctggcccgtgtgcatgaggctctcgcactcagacttgttgttgacctcggagatgtcgaacctctcagaggtggtggtgttgatgcagtagtagaacttgccagcaaacaggttgacacccatgatgctgaagatcagccagaagatgaggcagacgagcagcacgttcatgatggaggggatggcgcccaggagggcgttcaccaccaccctcatgccctcgaatcgggacagtgccctcaggggacgcagggcccgcagtgtccgcagggatttgatgggtcccagctccgagtagcccagccagttggccaccaagctgatgatggagacatccacgatgaggaagtcgagccagcaccaggcgttggtgaagtacaccttaaagccgtaggccacccatttgagcagcatctccatgatgaagatgtaggtgaagaccttgtcagcatattcgaggatggtgcggatgactcgccgctgctcgatgtagatgtcctcgaaggccagagccccgctgctgagcaggatcatgaagacaatgaaggtctcgaaccaattgtgctcgacgatcttgaagcaggccctgcgcagagtccaccacttcttcccgcggccctgagagatgtccacgtagaggcagggccagcgctgcacacaggcctcggtgaagcactcctcaggctgctccccctcggggttctcctctgcctgctcctcagggtcctcctcggggggcttgtagtcagctgtgctgcagacggaggagttcccatcatagaggggctgcggcggcttcttgctatcctcaggctccgagaaagtgtctgtttcctcctcggtgggcatctccaggtcggactcctcagaggcgatgggcacctgtatggtcaggtaggggttgttgatgaagttaaggtggtccagctcgatgctggatggtgggtcatcagccaggctcatgtggttcaggatgtgactgtccttcttcaggtcctcctcgggcggctccttcttctcatccacgggggcagtctccccggcctctccagcctccccggccccgacaggctccccgaggctgagcatgatgtccttggggctcaggatcttgccatgcagcagccccaggaggaaggccttggcaaagctgatgcccaacttgatgcgcccgatggcaatctgcaggttgttcatctcaccgtcctcatccgaggctgccagactgtcggcgctgaaggagctcagcagcagagccaggaacaggttcaggaccacgaggttgccgatgaccatgaccatgaggaagacggtgaggcacatggcttggccagccacctccatgcagtcccacatggtctcgatccactccccgcacaggatgcggaagacgatgaggaaggagtggaagaaatcatacatgtgccagcgaggcaggctgcagtccaaggcgatcttgcacacgcaatccttgtagctcttgccaaacagctgcatgcccaccacggcgaagatgaacacgatgatggccagcaccagcgtcaggttgcccagcgcccccacagagttgccaatgatcttgatgagcatgttcagcgtcggccatgacttggccagcttgaagacccgcagcagacggaaggagcggagcacagacagtccctgtacgttggccaggcctagctctaccaggctgagggtgacgatgatgctgtcgaagatattccagccctgctggaaatactcataggggtccattgcgatcagcttcagaaccatctctgctgtgaagatgcctgtgaagaccaggttgcccacagtgagcacgtggtcaaagtgctccgtcatggggtaatgttccatggccatgaagagggtgttgagcacgatgcagatggtgatgcccaggtccacgaacgggtccatgacgatcaggtggatgatgttcttgaacttcatccacggggcgcagcagtcccatatgagcactttgtgggcgcacttgtaccaccatggtgggcacttctggtgggcctcttccagttcttccatggcatcagagatgccgctgtctccgctgccgctctgccttggggctcccttctgccctggcgatgcgtccaggctgccattgcagtctttgccatgggctgggtccccatctgcctccccaccttccagagcttgggcggccttggccttctccagctcctcctggtgctttttgaacttctcgagcatctgctgaaactcctcctctttctccttatcctcggccagggtggcctcgttctgctcggcatacgccatggctaccacggccaggatcagattgatgaggtagaaagagcccaggaagatgatgaccacgaagaagatcatgtaggtcttgccagctgctcgaagggtcagctggaagaggttctcccaatagtcctgtgtcatgaggcggaagagagccaggaaggcccagctgaaggtgtcgtagctggtgtagccatagttggggttccgcccggtcttgatgcactcataaccctcggggcagtgcccagcatcactgctgttcccacagagtagggcatcgctggagccctccaggaagtagaagttcccttcatcattgatgtaggcgtcccagtcaaaggtatcgttggtggcccagcttgcatggctgttccacgtgtcgttggcataccatgagtcattgccataccacatctcattgccataccatgtgtcattgccgtaccacgtgtcattactgtaccacgtggtgttggtgtcgttgaacggcgggggccagcgcacacacttctgcctcaggtttcccatgaagagctgcagtcccaccagcgcaaagacgctcaggcagaagacagtgaggatcatcacatctgacagctttttcaccgactggatcagggcccccacaatcgtctttagccctgggatgaccgtgatggttttgagggcccgcagcacccggaaggtcctcaaggctgagatgttgcccaagtccacaaactctgtcaggtacgccatcatgatgacgctgaagtccagccagttccaggggtcccggaggaatgtgaagtcgtcgacacagaagcctcgggccagtatcttgatgagagactcaaaggtgtagatccccgtgaaggtgtactccacattcttggaccagggaggcgggtcactcatggtcatgaagacgcagttggtcaagatggtgatcatgatgaacatgctgaacagcgcgtggatgagcaccttgatggccccacgcctgaccaggctgaaggggctcagcaggtagagagcgggtgtggcggagaagcggaagatggccttgcccttgttgagtacgatgaaggtcttcttgtcactgtagtagggatccaggtcctccagggggatgccgatgacctccggtggggggtccccatagatcataggtaggttcttgccagcctccaagtcacttcgtggcttccgttcgggctcctcgatctccatctgcttgttccgctgcagccgggcttcctcctccaccgcccgctgttctatggctgccagggactcccgggtgaaggggcgcaagcaatcagggcccagaggcaccagggtgcacagagatggtctggccatcctcgcatcctgggctcagagaccaggagggtggtgagtggccaggggagctgcagtgcgcagccctggagtgctgggcggccgcccctccctgggccggccgtccactcctcacctcctgcttgcccagtggctgagccggggaggtgggcgtgcaggctctgtcgggactgggagatgtacctgcaaggcccaggtgctgctgctacacgggtgctgggcacagagcatcacccctggccccacaccacgctttccccagcagtggcaggggccgcccccaggaccgacggcaaaccaaccagattctttgtggccttgggacttgggaccaacaccctcgtgccttcgactgcctcctgggctcaagctccaggaactgtgtggcttcagctattggacgggagcagagcggttgctgacaagcccagagcgccgtgcccacctcaggctggggctggaactctgggggacttggctggggggccgggccggcgaggacagctgc

SEQ ID NO: 339 - RNA, 8281 nt, Macaca mulatta
  source 1..8281: mol_type = mRNA
gtgtacacccaggcaggcactcagtaagagtcttgtgtctgtgcgatatggcatttgagttgctggggacacaagtgtgcctgtgggcgcaactagaagccatgtgtatatgcacaagactgctgcgtgggtgcaagtgtgtttgtgcatgtgagctggaggcgtgtgtgtgaacgggtataacagcagaggaagcatctgcgtgaacgtatgaagggtgatttgcacatgactgagcctgtgggagcacagcttttgtgtgggtgtgtctgtgagtgtgcactcgagtgactgagtgtgagccagtgtgtacctcaggagtgcttctgggaataagtgtggagattcgagtgtgaggtgcgtgtgcccgggagtctgtcactcctagagcagtgaggctggagcccaagcggtgaggccggagccaagcaggctgagtccagagcacacccggcgagggaagtgtgaccgaggctcccacctgaagattggcccagtcctcaggtttcactcatgaccctgtgacatcagcggcagcagctgtcctcgccggcccggccccccagccaagtcccccagagttccagccccagcctgaggtgggcacggcgctctgggcttgtcagcaaccgctctgctcccgtccaatagctgaagccacacagttcctggagcttgagcccaggaggcagtcgaaggcacgagggtgttggtcccaagtcccaaggccacaaagaatctggttggtttgccgtcggtcctgggggtggcccctgccactgctggggaaagcgtggtgtggggccaggggtgatgctctgtgcccagcacccgtgtagcagcagcacctgggccttgcaggtacatctcccagtcccgacagagcctgcacgcccacctccccggctcagccactgggcaagcaggaggtgaggagtggacggccggcccagggaggggcggccgcccagcactccagggctgcgcactgcagctcccctggccactcaccaccctcctggtctctgagcccaggatgcgaggatggccagaccatctctgtgcaccctggtgcctctgggccctgattgcttgcgccccttcacccgggagtccctggcagccatagaacagcgggcggtggaggaggaagcccggctgcagcggaacaagcagatggagatcgaggagcccgaacggaagccacgaagtgacttggaggctggcaagaacctacctatgatctatggggaccccccaccggaggtcatcggcatccccctggaggacctggatccctactacagtgacaagaagaccttcatcgtactcaacaagggcaaggccatcttccgcttctccgccacacccgctctctacctgctgagccccttcagcctggtcaggcgtggggccatcaaggtgctcatccacgcgctgttcagcatgttcatcatgatcaccatcttgaccaactgcgtcttcatgaccatgagtgacccgcctccctggtccaagaatgtggagtacaccttcacggggatctacacctttgagtctctcatcaagatactggcccgaggcttctgtgtcgacgacttcacattcctccgggacccctggaactggctggacttcagcgtcatcatgatggcgtacctgacagagtttgtggacttgggcaacatctcagccttgaggaccttccgggtgctgcgggccctcaaaaccatcacggtcatcccagggctaaagacgattgtgggggccctgatccagtcggtgaaaaagctgtcagatgtgatgatcctcactgtcttctgcctgagcgtctttgcgctggtgggactgcagctcttcatgggaaacctgaggcagaagtgtgtgcgctggcccccgccgttcaacgacaccaacaccacgtggtacagtaatgacacgtggtacggcaatgacacatggtatggcaatgagatgtggtatggcaatgactcatggtatgccaacgacacgtggaacagccatgcaagctgggccaccaacgatacctttgactgggacgcctacatcaatgatgaagggaacttctacttcctggagggctccagcgatgccctactctgtgggaacagcagtgatgctgggcactgccccgagggttatgagtgcatcaagaccgggcggaaccccaactatggctacaccagctacgacaccttcagctgggccttcctggctctcttccgcctcatgacacaggactattgggagaacctcttccagctgacccttcgagcagctggcaagacctacatgatcttcttcgtggtcatcatcttcctgggctccttctacctcatcaatctgatcctggccgtggtagccatggcgtatgccgagcagaacgaggccaccctggccgaggataaggagaaagaggaggagtttcagcagatgctcgagaagttcaaaaagcaccaggaggagctggagaaggccaaggccgcccaagctctggaaggtggggaggcagatggggacccagcccatggcaaagactgcaatggcagcctggacgcatcgccagggcagaagggagccccaaggcagagcggcagcggagacagcagcatctctgatgccatggaagaactggaagaggcccaccagaagtgcccaccatggtggtacaagtgcgcccacaaagtgctcatatgggactgctgcgccccgtggatgaagttcaagaacatcatccacctgatcgtcatggacccgttcgtggacctgggcatcaccatctgcatcgtgctcaacaccctcttcatggccatggaacattaccctatgacggagcactttgaccacgtgctcactgtgggcaacctggtcttcacaggcatcttcacagcagagatggttctgaagctgatcgcaatggacccctatgagtatttccagcagggctggaatatcttcgacagcatcatcgtcaccctcagcctggtagagctaggcctggccaacgtacagggactgtctgtgctccgctccttccgtctgctgcgggtcttcaagctggccaagtcatggccgacgctgaacatgctcatcaagatcattggcaactctgtgggggcgctaggcaacctgacgctggtgctggccatcatcgtgttcatcttcgccgtggtgggcatgcagctgtttggcaagagctacaaggattgcgtgtgcaagatcgccttggactgcagcctgcctcgctggcacatgtatgatttcttccactccttcctcatcgtcttccgcatcctgtgcggggagtggatcgagaccatgtgggactgcatggaggtggctggccaagccatgtgcctcaccgtcttcctcatggtcatggtcatcggcaacctcgtggtcctgaacctgttcctggctctgctgctgagctccttcagcgccgacagtctggcagcctcggatgaggacggtgagatgaacaacctgcagattgccatcgggcgcatcaagttgggcatcagctttgccaaggccttcctcctggggctgctgcatggcaagatcctgagccccaaggacatcatgctcagcctcggggagcctgtcggggccggggaggctggagaggccggggagactgcccctgtggatgagaagaaggagccgcccgaggaggacctgaagaaggacagtcacatcctgaaccacatgagcctggctgatgacccaccatccagcatcgagctggaccaccttaacttcatcaacaacccctacctgaccatacaggtgcccatcgcctctgaggagtccgacctggagatgcccaccgaggaggaaacagacactttctcggagcctgaggatagcaagaagccgccgcagcccctctatgatgggaactcctccgtctgcagcacagctgactacaagccccccgaggaggaccctgaggagcaggcagaggagaaccccgagggggagcagcctgaggagtgcttcactgaggcctgtgtgcagcgctggccctgcctctacgtggacatctctcagggccgcgggaagaagtggtggactctgcgcagggcctgcttcaagatcgtcgagcacaattggttcgagaccttcattgtcttcatgatcctgctcagcagcggggctctggccttcgaggacatctacatcgagcagcggcgagtcatccgcaccatcctcgaatatgctgacaaggtcttcacctacatcttcatcatggagatgctgctcaaatgggtggcctacggctttaaggtgtacttcaccaacgcctggtgctggctcgacttcctcatcgtggatgtctccatcatcagcttggtggccaactggctgggctactcggagctgggacccatcaaatccctgcggacactgcgggccctgcgtcccctgagggcactgtcccgattcgagggcatgagggtggtggtgaacgccctcctgggcgccatcccctccatcatgaacgtgctgctcgtctgcctcatcttctggctgatcttcagcatcatgggtgtcaacctgtttgctggcaagttctactactgcatcaacaccaccacctctgagaggttcgacatctccgaggtcaacaacaagtctgagtgcgagagcctcatgcacacgggccaggtccgctggctcaacgtcaaggtcaactacgacaacgtgggcctgggctacctctccctcctgcaggtggccaccttcaagggttggatggacatcatgtatgcagccgtggactcccgggagaaggaggagcagccgcagtacgaggtgaacctctacatgtacctctactttgtcatcttcatcatcttcggctccttcttcaccctcaacctcttcattggtgtcatcattgacaacttcaaccagcagaagaagaagtttggagggaaagacatctttatgacggaggaacagaagaaatactataacgccatgaagaagcttggctccaagaagcctcagaaaccaattccccggccccagaacaagatccagggcatggtgtatgacctcgtgacgaagcaggccttcgacatcaccatcatgatcctcatctgcctcaacatggtcaccatgatggtggagacagacgaccagagccagctcaaggtggacatcctgtacaacatcaacatgatcttcatcatcatcttcacaggggagtgcgtgctcaagatgctcgccctgcgccagtactacttcaccgtcggctggaacatcttcgacttcgtggtcgtcatcctgtccattgtgggccttgcactctccgacctgatccagaagtacttcgtgtcacccacactgttccgtgtgatccgcctggcgcggatcgggcgtgtcctgcgactgatccgtggggccaagggcatccggacgctgctgttcgccctcatgatgtcgctgcctgccctcttcaacatcggcctcctcctcttcctggtcatgttcatctactccatctttggcatgtccaactttgcctatgtcaagaaggagtcgggcatcgatgatatgttcaacttcgagaccttcggcaacagcatcatctgcctgtttgagatcaccacgtcggctggctgggatgggctcctcaaccccatcctcaacagcgggcccccagactgtgaccccaacctggagaacccgggcaccagtgtcaagggtgactgcggcaatccctccatcggcatctgcttcttctgcagctacatcatcatctccttcctcatcgtggtcaacatgtacatcgccatcatcctggagaacttcaacgtggccacagaggagagcagcgagccccttggtgaggatgactttgagatgttctacgagacatgggagaagttcgacccggatgccacccagttcattgcctacagccgcctctcggactttgtggacaccctgcaggaaccgctgaggatcgccaagcccaacaagatcaagctcatcacgctggacctgcccatggtgccgggggacaagatccactgcctggacatcctctttgccctgaccaaagaggtcctgggtgactctggggaaatggacgccctcaagcagaccatggaggagaagttcatggcagccaacccctccaaggtgtcctacgagcccatcaccaccaccctcaagaggaagcatgaggaggtgtgcgccatcaagatccagagggcctaccgccggcacctgctacagcgctccgtgaagcaggcatcctacatgtaccgccacagccacgacggcagcggggacaacgcccctgagaaggaggggctgcttgccaacaccatgagcaagatgtatggccacgagaacgggaacagcagctcgcagagcccagaggagaagggcgaggcaggggatgccatacccactatggggctgatgcccatcagcccctcagacactgcccagcctcccacctctcccccggggcatatagtgcgcccaggcgtcaaggagtctcttgtctagcaggcagcatcgaggtggccctctgagtctcagcacagtccccagagctcccccgtggtgcctgcatacagagtgagggaggagggctttggttctgggactgcgtctggctccctgatgggggacaggatttggccacactggggctgacacccaggcccaagcgcctgcatctccagacccgagcgtctgtgtctctagaccatgggaaatgggcattgcactcaggggctccatgctgggcctgaggcccctgcctccatgatttaaccttcaagttgctctgacctcctcctgggccctgtcgcccctccttttggcctgggggagatcagaacgttggaattgctcgctgcccctcacttggggaggagctggcctgcggtggagccctcagttgctgccccatcaccagagtcttaagggtcactggcctctccccaggaagtggctcagacccctcagccccagcccagacaaagatgtcttaacctcagggagtgcagacacctaaccccagggcactgccagcccgcccgctctgactctggggtgcaacttcgcccaccaggccagctcaggaattccctggacaagggaaatgtgactggttcagaaatagctcctcaagcctcaaaacctgattggccactggatcctgctgctttgggctgggatggtgactcctgaaaccttttcccaggccatatccaggtccatagctcccctggctggcccctaggggaagaacagaaggaaggatgccacttgggaattgtccttttctaggaagcacgggtgagacaggctgggtcctgccagctggatcgctgcacatggcctgagcatccagacctgagcgggggtcggggacctgctgctcagtaagaagattcttgccccttccctctctccctgcctcactcctccgtgagcaccaccagggctccaggagcctcatccagcctcagagatcccccttctcatctcgccaggcctgtctcattctctctcctcatttttcccacctctctcctcaaagtgatcctaagaatgtacagtttagctcaggttagatattttgaccctggggcgtgcagcaggaaaggcccgactggctcaggctcaaccttccaacctcccgtggcctgaaaaagcacttcttctgcactgcggttctgggcatggcagggccaggcctctgctggctcctggagaacagaggctgtgtccagaggaggaggggtgagagacctgctcaggcgtcactggatttattcactgtgtatgtacctgtggctgtgtgtctgcttgtatgcttgtaggcctgtgtgtatagccgtgtgtatgttcaagtgcgtgactgtacatgtgtgtgtgaaccactgtgtactggtgcctgcattatgcacgtgtgtctgggtatctttgtatatatgtgtgtcagtgtgccctggagtgtttcaaggtccatggagtatggctggtgtgtcgtactgtgcaggcctgtccctgggagtgttcctgtgtctgggagagtggacctgtggatgagtgtgaatgcgtatggtaaggtgtgtactcagggcattctgttggcctaagtgcctcttctttttcttcttgtttctcatgaaaagtttgattaaaattcaggaagcagcaaaaccttcaaaacaagacatgtatgtgtgcttgtgtgtgtgcacaggtgtgtgtgtgtgtg

SEQ ID NO: 340 - RNA, 8281 nt, Macaca mulatta
  source 1..8281: mol_type = mRNA
cacacacacacacacctgtgcacacacacaagcacacatacatgtcttgttttgaaggttttgctgcttcctgaattttaatcaaacttttcatgagaaacaagaagaaaaagaagaggcacttaggccaacagaatgccctgagtacacaccttaccatacgcattcacactcatccacaggtccactctcccagacacaggaacactcccagggacaggcctgcacagtacgacacaccagccatactccatggaccttgaaacactccagggcacactgacacacatatatacaaagatacccagacacacgtgcataatgcaggcaccagtacacagtggttcacacacacatgtacagtcacgcacttgaacatacacacggctatacacacaggcctacaagcatacaagcagacacacagccacaggtacatacacagtgaataaatccagtgacgcctgagcaggtctctcacccctcctcctctggacacagcctctgttctccaggagccagcagaggcctggccctgccatgcccagaaccgcagtgcagaagaagtgctttttcaggccacgggaggttggaaggttgagcctgagccagtcgggcctttcctgctgcacgccccagggtcaaaatatctaacctgagctaaactgtacattcttaggatcactttgaggagagaggtgggaaaaatgaggagagagaatgagacaggcctggcgagatgagaagggggatctctgaggctggatgaggctcctggagccctggtggtgctcacggaggagtgaggcagggagagagggaaggggcaagaatcttcttactgagcagcaggtccccgacccccgctcaggtctggatgctcaggccatgtgcagcgatccagctggcaggacccagcctgtctcacccgtgcttcctagaaaaggacaattcccaagtggcatccttccttctgttcttcccctaggggccagccaggggagctatggacctggatatggcctgggaaaaggtttcaggagtcaccatcccagcccaaagcagcaggatccagtggccaatcaggttttgaggcttgaggagctatttctgaaccagtcacatttcccttgtccagggaattcctgagctggcctggtgggcgaagttgcaccccagagtcagagcgggcgggctggcagtgccctggggttaggtgtctgcactccctgaggttaagacatctttgtctgggctggggctgaggggtctgagccacttcctggggagaggccagtgacccttaagactctggtgatggggcagcaactgagggctccaccgcaggccagctcctccccaagtgaggggcagcgagcaattccaacgttctgatctcccccaggccaaaaggaggggcgacagggcccaggaggaggtcagagcaacttgaaggttaaatcatggaggcaggggcctcaggcccagcatggagcccctgagtgcaatgcccatttcccatggtctagagacacagacgctcgggtctggagatgcaggcgcttgggcctgggtgtcagccccagtgtggccaaatcctgtcccccatcagggagccagacgcagtcccagaaccaaagccctcctccctcactctgtatgcaggcaccacgggggagctctggggactgtgctgagactcagagggccacctcgatgctgcctgctagacaagagactccttgacgcctgggcgcactatatgccccgggggagaggtgggaggctgggcagtgtctgaggggctgatgggcatcagccccatagtgggtatggcatcccctgcctcgcccttctcctctgggctctgcgagctgctgttcccgttctcgtggccatacatcttgctcatggtgttggcaagcagcccctccttctcaggggcgttgtccccgctgccgtcgtggctgtggcggtacatgtaggatgcctgcttcacggagcgctgtagcaggtgccggcggtaggccctctggatcttgatggcgcacacctcctcatgcttcctcttgagggtggtggtgatgggctcgtaggacaccttggaggggttggctgccatgaacttctcctccatggtctgcttgagggcgtccatttccccagagtcacccaggacctctttggtcagggcaaagaggatgtccaggcagtggatcttgtcccccggcaccatgggcaggtccagcgtgatgagcttgatcttgttgggcttggcgatcctcagcggttcctgcagggtgtccacaaagtccgagaggcggctgtaggcaatgaactgggtggcatccgggtcgaacttctcccatgtctcgtagaacatctcaaagtcatcctcaccaaggggctcgctgctctcctctgtggccacgttgaagttctccaggatgatggcgatgtacatgttgaccacgatgaggaaggagatgatgatgtagctgcagaagaagcagatgccgatggagggattgccgcagtcacccttgacactggtgcccgggttctccaggttggggtcacagtctgggggcccgctgttgaggatggggttgaggagcccatcccagccagccgacgtggtgatctcaaacaggcagatgatgctgttgccgaaggtctcgaagttgaacatatcatcgatgcccgactccttcttgacataggcaaagttggacatgccaaagatggagtagatgaacatgaccaggaagaggaggaggccgatgttgaagagggcaggcagcgacatcatgagggcgaacagcagcgtccggatgcccttggccccacggatcagtcgcaggacacgcccgatccgcgccaggcggatcacacggaacagtgtgggtgacacgaagtacttctggatcaggtcggagagtgcaaggcccacaatggacaggatgacgaccacgaagtcgaagatgttccagccgacggtgaagtagtactggcgcagggcgagcatcttgagcacgcactcccctgtgaagatgatgatgaagatcatgttgatgttgtacaggatgtccaccttgagctggctctggtcgtctgtctccaccatcatggtgaccatgttgaggcagatgaggatcatgatggtgatgtcgaaggcctgcttcgtcacgaggtcatacaccatgccctggatcttgttctggggccggggaattggtttctgaggcttcttggagccaagcttcttcatggcgttatagtatttcttctgttcctccgtcataaagatgtctttccctccaaacttcttcttctgctggttgaagttgtcaatgatgacaccaatgaagaggttgagggtgaagaaggagccgaagatgatgaagatgacaaagtagaggtacatgtagaggttcacctcgtactgcggctgctcctccttctcccgggagtccacggctgcatacatgatgtccatccaacccttgaaggtggccacctgcaggagggagaggtagcccaggcccacgttgtcgtagttgaccttgacgttgagccagcggacctggcccgtgtgcatgaggctctcgcactcagacttgttgttgacctcggagatgtcgaacctctcagaggtggtggtgttgatgcagtagtagaacttgccagcaaacaggttgacacccatgatgctgaagatcagccagaagatgaggcagacgagcagcacgttcatgatggaggggatggcgcccaggagggcgttcaccaccaccctcatgccctcgaatcgggacagtgccctcaggggacgcagggcccgcagtgtccgcagggatttgatgggtcccagctccgagtagcccagccagttggccaccaagctgatgatggagacatccacgatgaggaagtcgagccagcaccaggcgttggtgaagtacaccttaaagccgtaggccacccatttgagcagcatctccatgatgaagatgtaggtgaagaccttgtcagcatattcgaggatggtgcggatgactcgccgctgctcgatgtagatgtcctcgaaggccagagccccgctgctgagcaggatcatgaagacaatgaaggtctcgaaccaattgtgctcgacgatcttgaagcaggccctgcgcagagtccaccacttcttcccgcggccctgagagatgtccacgtagaggcagggccagcgctgcacacaggcctcagtgaagcactcctcaggctgctccccctcggggttctcctctgcctgctcctcagggtcctcctcggggggcttgtagtcagctgtgctgcagacggaggagttcccatcatagaggggctgcggcggcttcttgctatcctcaggctccgagaaagtgtctgtttcctcctcggtgggcatctccaggtcggactcctcagaggcgatgggcacctgtatggtcaggtaggggttgttgatgaagttaaggtggtccagctcgatgctggatggtgggtcatcagccaggctcatgtggttcaggatgtgactgtccttcttcaggtcctcctcgggcggctccttcttctcatccacaggggcagtctccccggcctctccagcctccccggccccgacaggctccccgaggctgagcatgatgtccttggggctcaggatcttgccatgcagcagccccaggaggaaggccttggcaaagctgatgcccaacttgatgcgcccgatggcaatctgcaggttgttcatctcaccgtcctcatccgaggctgccagactgtcggcgctgaaggagctcagcagcagagccaggaacaggttcaggaccacgaggttgccgatgaccatgaccatgaggaagacggtgaggcacatggcttggccagccacctccatgcagtcccacatggtctcgatccactccccgcacaggatgcggaagacgatgaggaaggagtggaagaaatcatacatgtgccagcgaggcaggctgcagtccaaggcgatcttgcacacgcaatccttgtagctcttgccaaacagctgcatgcccaccacggcgaagatgaacacgatgatggccagcaccagcgtcaggttgcctagcgcccccacagagttgccaatgatcttgatgagcatgttcagcgtcggccatgacttggccagcttgaagacccgcagcagacggaaggagcggagcacagacagtccctgtacgttggccaggcctagctctaccaggctgagggtgacgatgatgctgtcgaagatattccagccctgctggaaatactcataggggtccattgcgatcagcttcagaaccatctctgctgtgaagatgcctgtgaagaccaggttgcccacagtgagcacgtggtcaaagtgctccgtcatagggtaatgttccatggccatgaagagggtgttgagcacgatgcagatggtgatgcccaggtccacgaacgggtccatgacgatcaggtggatgatgttcttgaacttcatccacggggcgcagcagtcccatatgagcactttgtgggcgcacttgtaccaccatggtgggcacttctggtgggcctcttccagttcttccatggcatcagagatgctgctgtctccgctgccgctctgccttggggctcccttctgccctggcgatgcgtccaggctgccattgcagtctttgccatgggctgggtccccatctgcctccccaccttccagagcttgggcggccttggccttctccagctcctcctggtgctttttgaacttctcgagcatctgctgaaactcctcctctttctccttatcctcggccagggtggcctcgttctgctcggcatacgccatggctaccacggccaggatcagattgatgaggtagaaggagcccaggaagatgatgaccacgaagaagatcatgtaggtcttgccagctgctcgaagggtcagctggaagaggttctcccaatagtcctgtgtcatgaggcggaagagagccaggaaggcccagctgaaggtgtcgtagctggtgtagccatagttggggttccgcccggtcttgatgcactcataaccctcggggcagtgcccagcatcactgctgttcccacagagtagggcatcgctggagccctccaggaagtagaagttcccttcatcattgatgtaggcgtcccagtcaaaggtatcgttggtggcccagcttgcatggctgttccacgtgtcgttggcataccatgagtcattgccataccacatctcattgccataccatgtgtcattgccgtaccacgtgtcattactgtaccacgtggtgttggtgtcgttgaacggcgggggccagcgcacacacttctgcctcaggtttcccatgaagagctgcagtcccaccagcgcaaagacgctcaggcagaagacagtgaggatcatcacatctgacagctttttcaccgactggatcagggcccccacaatcgtctttagccctgggatgaccgtgatggttttgagggcccgcagcacccggaaggtcctcaaggctgagatgttgcccaagtccacaaactctgtcaggtacgccatcatgatgacgctgaagtccagccagttccaggggtcccggaggaatgtgaagtcgtcgacacagaagcctcgggccagtatcttgatgagagactcaaaggtgtagatccccgtgaaggtgtactccacattcttggaccagggaggcgggtcactcatggtcatgaagacgcagttggtcaagatggtgatcatgatgaacatgctgaacagcgcgtggatgagcaccttgatggccccacgcctgaccaggctgaaggggctcagcaggtagagagcgggtgtggcggagaagcggaagatggccttgcccttgttgagtacgatgaaggtcttcttgtcactgtagtagggatccaggtcctccagggggatgccgatgacctccggtggggggtccccatagatcataggtaggttcttgccagcctccaagtcacttcgtggcttccgttcgggctcctcgatctccatctgcttgttccgctgcagccgggcttcctcctccaccgcccgctgttctatggctgccagggactcccgggtgaaggggcgcaagcaatcagggcccagaggcaccagggtgcacagagatggtctggccatcctcgcatcctgggctcagagaccaggagggtggtgagtggccaggggagctgcagtgcgcagccctggagtgctgggcggccgcccctccctgggccggccgtccactcctcacctcctgcttgcccagtggctgagccggggaggtgggcgtgcaggctctgtcgggactgggagatgtacctgcaaggcccaggtgctgctgctacacgggtgctgggcacagagcatcacccctggccccacaccacgctttccccagcagtggcaggggccacccccaggaccgacggcaaaccaaccagattctttgtggccttgggacttgggaccaacaccctcgtgccttcgactgcctcctgggctcaagctccaggaactgtgtggcttcagctattggacgggagcagagcggttgctgacaagcccagagcgccgtgcccacctcaggctggggctggaactctgggggacttggctggggggccgggccggcgaggacagctgctgccgctgatgtcacagggtcatgagtgaaacctgaggactgggccaatcttcaggtgggagcctcggtcacacttccctcgccgggtgtgctctggactcagcctgcttggctccggcctcaccgcttgggctccagcctcactgctctaggagtgacagactcccgggcacacgcacctcacactcgaatctccacacttattcccagaagcactcctgaggtacacactggctcacactcagtcactcgagtgcacactcacagacacacccacacaaaagctgtgctcccacaggctcagtcatgtgcaaatcacccttcatacgttcacgcagatgcttcctctgctgttatacccgttcacacacacgcctccagctcacatgcacaaacacacttgcacccacgcagcagtcttgtgcatatacacatggcttctagttgcgcccacaggcacacttgtgtccccagcaactcaaatgccatatcgcacagacacaagactcttactgagtgcctgcctgggtgtacac

SEQ ID NO: 341 - RNA, 1710 nt, Homo sapiens
  source 1..1710: mol_type = mRNA
atggccctcccgacaccctcggacagcaccctccccgcggaagcccggggacgaggacggcgacggagactcgtttggaccccgagccaaagcgaggccctgcgagcctgctttgagcggaacccgtacccgggcatcgccaccagagaacggctggcccaggccatcggcattccggagcccagggtccagatttggtttcagaatgagaggtcacgccagctgaggcagcaccggcgggaatctcggccctggcccgggagacgcggcccgccagaaggccggcgaaagcggaccgccgtcaccggatcccagaccgccctgctcctccgagcctttgagaaggatcgctttccaggcatcgccgcccgggaggagctggccagagagacgggcctcccggagtccaggattcagatctggtttcagaatcgaagggccaggcacccgggacagggtggcagggcgcccgcgcaggcaggcggcctgtgcagcgcggcccccggcgggggtcaccctgctccctcgtgggtcgccttcgcccacaccggcgcgtggggaacggggcttcccgcaccccacgtgccctgcgcgcctggggctctcccacagggggctttcgtgagccaggcagcgagggccgcccccgcgctgcagcccagccaggccgcgccggcagaggggatctcccaacctgccccggcgcgcggggatttcgcctacgccgccccggctcctccggacggggcgctctcccaccctcaggctcctcggtggcctccgcacccgggcaaaagccgggaggaccgggacccgcagcgcgacggcctgccgggcccctgcgcggtggcacagcctgggcccgctcaagcggggccgcagggccaaggggtgcttgcgccacccacgtcccaggggagtccgtggtggggctggggccggggtccccaggtcgccggggcggcgtgggaaccccaagccggggcagctccacctccccagcccgcgcccccggacgcctccgcctccgcgcggcaggggcagatgcaaggcatcccggcgccctcccaggcgctccaggagccggcgccctggtctgcactcccctgcggcctgctgctggatgagctcctggcgagcccggagtttctgcagcaggcgcaacctctcctagaaacggaggccccgggggagctggaggcctcggaagaggccgcctcgctggaagcacccctcagcgaggaagaataccgggctctgctggaggagctttaggacgcggggttgggacggggtcgggtggttcggggcagggcggtggcctctctttcgcggggaacacctggctggctacggaggggcgtgtctccgccccgccccctccaccgggctgaccggcctgggattcctgccttctaggtctaggcccggtgagagactccactccgcggagaactgcctttctttcctgggcatcccggggatcccagagccggcccaggtaccagcagacctgcgcgcagtgcgcaccccggctgacgtgcaagggagctcgctggcctctctgtgcccttgttcttccgtgaaattctggctgaatgtctccccccaccttccgacgctgtctaggcaaacctggattagagttacatctcctggatgattagttcagagatatattaaaatgccccctccctgtggatcctatag

SEQ ID NO: 342 - RNA, 1710 nt, Homo sapiens
  source 1..1710: mol_type = mRNA
ctataggatccacagggagggggcattttaatatatctctgaactaatcatccaggagatgtaactctaatccaggtttgcctagacagcgtcggaaggtggggggagacattcagccagaatttcacggaagaacaagggcacagagaggccagcgagctcccttgcacgtcagccggggtgcgcactgcgcgcaggtctgctggtacctgggccggctctgggatccccgggatgcccaggaaagaaaggcagttctccgcggagtggagtctctcaccgggcctagacctagaaggcaggaatcccaggccggtcagcccggtggagggggcggggcggagacacgcccctccgtagccagccaggtgttccccgcgaaagagaggccaccgccctgccccgaaccacccgaccccgtcccaaccccgcgtcctaaagctcctccagcagagcccggtattcttcctcgctgaggggtgcttccagcgaggcggcctcttccgaggcctccagctcccccggggcctccgtttctaggagaggttgcgcctgctgcagaaactccgggctcgccaggagctcatccagcagcaggccgcaggggagtgcagaccagggcgccggctcctggagcgcctgggagggcgccgggatgccttgcatctgcccctgccgcgcggaggcggaggcgtccgggggcgcgggctggggaggtggagctgccccggcttggggttcccacgccgccccggcgacctggggaccccggccccagccccaccacggactcccctgggacgtgggtggcgcaagcaccccttggccctgcggccccgcttgagcgggcccaggctgtgccaccgcgcaggggcccggcaggccgtcgcgctgcgggtcccggtcctcccggcttttgcccgggtgcggaggccaccgaggagcctgagggtgggagagcgccccgtccggaggagccggggcggcgtaggcgaaatccccgcgcgccggggcaggttgggagatcccctctgccggcgcggcctggctgggctgcagcgcgggggcggccctcgctgcctggctcacgaaagccccctgtgggagagccccaggcgcgcagggcacgtggggtgcgggaagccccgttccccacgcgccggtgtgggcgaaggcgacccacgagggagcagggtgacccccgccgggggccgcgctgcacaggccgcctgcctgcgcgggcgccctgccaccctgtcccgggtgcctggcccttcgattctgaaaccagatctgaatcctggactccgggaggcccgtctctctggccagctcctcccgggcggcgatgcctggaaagcgatccttctcaaaggctcggaggagcagggcggtctgggatccggtgacggcggtccgctttcgccggccttctggcgggccgcgtctcccgggccagggccgagattcccgccggtgctgcctcagctggcgtgacctctcattctgaaaccaaatctggaccctgggctccggaatgccgatggcctgggccagccgttctctggtggcgatgcccgggtacgggttccgctcaaagcaggctcgcagggcctcgctttggctcggggtccaaacgagtctccgtcgccgtcctcgtccccgggcttccgcggggagggtgctgtccgagggtgtcgggagggccat

SEQ ID NO: 343 - RNA, 2025 nt, Mus musculus
  source 1..2025: mol_type = mRNA
atggcagaagctggcagccctgttggtggcagtggtgtggcacgggaatcccggcggcgcaggaagacggtttggcaggcctggcaagagcaggccctgctatcaactttcaagaagaagagatacctgagcttcaaggagaggaaggagctggccaagcgaatgggggtctcagattgccgcatccgcgtgtggtttcagaaccgcaggaatcgcagtggagaggaggggcatgcctcaaagaggtccatcagaggctccaggcggctagcctcgccacagctccaggaagagcttggatccaggccacagggtagaggcatgcgctcatctggcagaaggcctcgcactcgactcacctcgctacagctcaggatcctagggcaagcctttgagaggaacccacgaccaggctttgctaccagggaggagctggcgcgtgacacagggttgcccgaggacacgatccacatatggtttcaaaaccgaagagctcggcggcgccacaggaggggcaggcccacagctcaagatcaagacttgctggcgtcacaagggtcggatggggcccctgcaggtccggaaggcagagagcgtgaaggtgcccaggagaacttgttgccacaggaagaagcaggaagtacgggcatggatacctcgagccctagcgacttgccctccttctgcggagagtcccagcctttccaagtggcacagccccgtggagcaggccaacaagaggcccccactcgagcaggcaacgcaggctctctggaacccctccttgatcagctgctggatgaagtccaagtagaagagcctgctccagcccctctgaatttggatggagaccctggtggcagggtgcatgaaggttcccaggagagcttttggccacaggaagaagcaggaagtacaggcatggatacttctagccccagcgactcaaactccttctgcagagagtcccagccttcccaagtggcacagccctgtggagcgggccaagaagatgcccgcactcaagcagacagcacaggccctctggaactcctcctccttgatcaactgctggacgaagtccaaaaggaagagcatgtgccagtcccactggattggggtagaaatcctggcagcagggagcatgaaggttcccaggacagcttactgcccctggaggaagcagtaaattcgggcatggatacctcgatccctagcatctggccaaccttctgcagagaatcccagcctccccaagtggcacagccctctggaccaggccaagcacaggcccccactcaaggtgggaacacggaccccctggagctcttcctctatcaactgttggatgaagtccaagtagaagagcatgctccagcccctctgaattgggatgtagatcctggtggcagggtgcatgaaggttcgtgggagagcttttggccacaggaagaagcaggaagtacaggcctggatacttcaagccccagcgactcaaactccttcttcagagagtccaagccttcccaagtggcacagcgccgtggagcgggccaagaagatgcccgcactcaagcagacagcacaggccctctggaactcctcctctttgatcaactgctggacgaagtccaaaaggaagagcatgtgccagccccactggattggggtagaaatcctggcagcatggagcatgaaggttcccaggacagcttactgcccctggaggaagcagcaaattcgggcagggatacctcgatccctagcatctggccagccttctgcagaaaatcccagcctccccaagtggcacagccctctggaccaggccaagcacaggcccccattcaaggtgggaacacggaccccctggagctcttccttgatcaactgctgaccgaagtccaacttgaggagcaggggcctgcccctgtgaatgtggaggaaacatgggagcaaatggacacaacacctgatctgcctctcacttcagaagaatatcagactcttctagatatgctctga

SEQ ID NO: 344 - RNA, 2025 nt, Mus musculus
  source 1..2025: mol_type = mRNA
tcagagcatatctagaagagtctgatattcttctgaagtgagaggcagatcaggtgttgtgtccatttgctcccatgtttcctccacattcacaggggcaggcccctgctcctcaagttggacttcggtcagcagttgatcaaggaagagctccagggggtccgtgttcccaccttgaatgggggcctgtgcttggcctggtccagagggctgtgccacttggggaggctgggattttctgcagaaggctggccagatgctagggatcgaggtatccctgcccgaatttgctgcttcctccaggggcagtaagctgtcctgggaaccttcatgctccatgctgccaggatttctaccccaatccagtggggctggcacatgctcttccttttggacttcgtccagcagttgatcaaagaggaggagttccagagggcctgtgctgtctgcttgagtgcgggcatcttcttggcccgctccacggcgctgtgccacttgggaaggcttggactctctgaagaaggagtttgagtcgctggggcttgaagtatccaggcctgtacttcctgcttcttcctgtggccaaaagctctcccacgaaccttcatgcaccctgccaccaggatctacatcccaattcagaggggctggagcatgctcttctacttggacttcatccaacagttgatagaggaagagctccagggggtccgtgttcccaccttgagtgggggcctgtgcttggcctggtccagagggctgtgccacttggggaggctgggattctctgcagaaggttggccagatgctagggatcgaggtatccatgcccgaatttactgcttcctccaggggcagtaagctgtcctgggaaccttcatgctccctgctgccaggatttctaccccaatccagtgggactggcacatgctcttccttttggacttcgtccagcagttgatcaaggaggaggagttccagagggcctgtgctgtctgcttgagtgcgggcatcttcttggcccgctccacagggctgtgccacttgggaaggctgggactctctgcagaaggagtttgagtcgctggggctagaagtatccatgcctgtacttcctgcttcttcctgtggccaaaagctctcctgggaaccttcatgcaccctgccaccagggtctccatccaaattcagaggggctggagcaggctcttctacttggacttcatccagcagctgatcaaggaggggttccagagagcctgcgttgcctgctcgagtgggggcctcttgttggcctgctccacggggctgtgccacttggaaaggctgggactctccgcagaaggagggcaagtcgctagggctcgaggtatccatgcccgtacttcctgcttcttcctgtggcaacaagttctcctgggcaccttcacgctctctgccttccggacctgcaggggccccatccgacccttgtgacgccagcaagtcttgatcttgagctgtgggcctgcccctcctgtggcgccgccgagctcttcggttttgaaaccatatgtggatcgtgtcctcgggcaaccctgtgtcacgcgccagctcctccctggtagcaaagcctggtcgtgggttcctctcaaaggcttgccctaggatcctgagctgtagcgaggtgagtcgagtgcgaggccttctgccagatgagcgcatgcctctaccctgtggcctggatccaagctcttcctggagctgtggcgaggctagccgcctggagcctctgatggacctctttgaggcatgcccctcctctccactgcgattcctgcggttctgaaaccacacgcggatgcggcaatctgagacccccattcgcttggccagctccttcctctccttgaagctcaggtatctcttcttcttgaaagttgatagcagggcctgctcttgccaggcctgccaaaccgtcttcctgcgccgccgggattcccgtgccacaccactgccaccaacagggctgccagcttctgccat

SEQ ID NO: 345 - RNA, 7257 nt, Rattus norvegicus
  source 1..7257: mol_type = mRNA
cccggctcccagcactcagggagggggcgcctccgctgagctcccgcccctaaaacttcccagccggcccacgtccgacccgccccctctgcatctgcgtctggtagcgggctgtcactctggctctatggcagagtggccccatgctctctgacttgtgactgactgttccttgttttcagagtcccagagtagcctggtctcaaacaatagatcctttctccgctaggcatctggtgcagcactcctgaagcaccgggttgggtaggggtttggatgccgggattggatgcaggattttttttttttttccgcagctaacgggccccaccggaggaggcattatttcccctccccccttccctctcccccctggattaaggcttgctagtactgagggtttatcctgcagctgggactgccagtcttttgtcaccaaggctgacaggcttacgagtggttggggctctgactcttctttccccctgcggcgattggggctgcagattgcttccgcctgtccttgccttagtttttctattttaccgtcctttttcatctgtcttgtcacctctttctgatgctcattctttctttccgtcccgaggatatggtctatcctttgttactctgactcttctatctcggagttgaatggaggaagcgtccaatccgccatcttaccccagaaagcaaacattttcccttctgatacagtggggaagtgggtatgtggagtggggagaggaggagactacgaagaggacgaggtagtatcagtgggacaccaagttgctgctggagagatgttctccacatccttcagtttcagatgcgagtgccctaattaggtaatttctgctgcttgactgaaacacccaggctcgatccctgattcctgtaattgcaattacatgggaggggaggaacggctactgggtctttccttgctttgccgttcgggtaggttcctgtgggtcgaggtagtatttttccacacacgtattttttttcattagtttagtcacgtggcttttttaaaactaacactcgtatcatacacagatatctgtaacacactccataaaggttaattaatgcaaccaattgcatctaggtacaggggctcccagggtttttgctttttttttttttaacttttgctttcttaattattttttaagtgaacacaacaatgtgttttatcccaagccacaagaatattatcttttgtcgacaaaatatatatatatatatatttttaacattacgtgcgtatgaaatgtaagttttggctacagtcagtagaaaattggcaatattaaggggtcagcaagtaatctttaagacattaatgtctgactataatataaaacatactagaaaactcaacggtagaacagaccccctgtggtaaagccttagctttcgtaggattgctgtgattgaatggatcacctctacaggtttggtacgcacctagaaggaaaaagcctgacacatctgtgagcgattctctcgattaggttactaaagcgagaaggcccacttcaagcagggtactccattcccgggacatagtgcttgggttctggactgcgttaaaacggagaagtggctccgagcagcggcgcccatggctgtcttcctcctgacttcggaaacagtatgaccagctgcttcaggctcctgctgccccgacatccctgcatggtggactgtgccctggaactgtgagccaaaatgaactcttcctttcttaaattgcttgcgtcagggtagatttatcacacccagaaaggtaactaagtttgtttctcaaatatcccgagcctattagactcaccgaagcaccaactgtctctttcttctttagcagcagagacaactgaaattattcctcactagcagttttaattcaactgttgctttcaacagaggcacaatagccatgcaaacttggcatgcctatgtctcttctaagctattcatagatgcatataaaaacagcaagatcatagttctatctgtctatacttctcccctgcgaacacatttactcaggaggacaaggctcttgggtgaggttcattctttccttaccaaacgtagaatgtggctatgtaaagttatttattctttcattcactcattcctttgcttgcgtgtgtatggggtggggcacattggtgctatggcatctgtaaatgtcagaggacctcttgtgggagttgcctctctcagattgtcaggatttagcagcaagcaccttgacctgctcagccacctcgcaggcctctggagttatctgttattaatatacggtgtatcgctagagaaggtaatggaagagtctttcaagtctgcatataagcatgctcataaagcacgtatatataatgtgcacacatatgcacatgtatagcagcaggacaggctaagaaaggagagggaagcaggctgggacttggccagagccacagtgctggtggctctacatccttgaccctctccaggtgaggtcttcagctatactgtttccccttcctacttagacggttaaccccaccctactggattaaggaacctagttcttctctttaatcacatttcccaagcccattcacggcacacccacactgaggttgagtcaataccccagagagcttaggctggcttcttgggtgtacaatcaggtcagcaagggcagaacaaaagcagaaatgtgttctagcagaagatgagaaaaagttgaaacataaggaaaaaggggagactcctagtatattacacaatatggccaagtccaggtgattaagagataagacaaccggaaaggaataggagggcccaggactgcagctcagtgacagaagacttccttacccagcctgtctgagactggcttccatcccaagcacagcaaacaatggggagggggaggaggaggaggagatcaaggattatagaaataacatgcaggtacaacctagagagctcagaagtaaaacatggagaggtgttatggaggaggcagaattacccagaagaatctgtactttcctccaaattcagcttctcctttgtggtaattacttcaaattcctcttaggtggctgttttagtcaaattttacattgctctaacaagtgcccccacagagacagcttaagagaggaagaattcatttcttgctcactagttcagagctctatctgtgatcatggggggtccattgctgtgggcccaaggtcaggcagaatatcatggcattgtggtagtgagtctgaggttcatttttcttggatatgtagaagagggagagagggagagagggagagagggagagagggagagagggagggagggagagagggagagagggagggagaggaagagggagagggagagggagagggagagggagagggagagggagagggagagggagagggagagggagagggagaaaagaatgcattattccagggccaagacctgtcctttaaagtcacacagcatccatagttcattgtctgtcaggagtcctaaacttcagtccatcagagggttaaaccagtgattagctcaactctcttatgatctaatcttcactggagacaccttagacacacccagaggccggtttcactaatctcccaggaacctcttaatccaatcaagttgactgtcaagattggccagtgctgtcgcatatttaatgaagggattaaacaacaggtatttaagggatgggtgggccactctgggctttgctacatcctgtgtctctgtgaatagctctcttgggcctcgtgggatccaggtggctgcagcatggatctgaactgcactggtggcctactggaaaaagaagcccggagaaggaggattattctaaaccagagtcaaaaggacacccttcgtgtgtggtttgaaaagaatcccaatcctgacttagctaccaggggacatctggctaagaaactcggcatctctgagtctcaaataatgacttggtttcagaagcacagaaaaatacggaaacaagtagagtttgaatgttgctctgaagaaagccaagagcaaggacaggataaacccagagttaaagaagctgggaggagcaggacgcatttcacaaagtttcagattgatattctaatcgaagcttttgagaagaatcgattcccagggatcgttaccagggaaaaactggctcaagaaacaggcatcccagaatccagaattcatatatggtttcagaaccggagagcacggcacccagacccaaaacagggtactcgggcaacttctcatccgcctgagagcagccagtgccctgcccagaagactactggtcaacttgctccttccaaagatcccaccagcagctgttccgttatattgcctctctctccaccccacacgccaaatggtcctttggatctctctaggggccgtcagaagcagttaccagagaccacagtactacagccctcccaggttgtacagcgaaggggcgatgatcaaaatccctcactgtttattgatcacttatcagaggtaaaaagtccaggagagaaggagggcttccatactcaggctcctttacagctcccaatccaaaaaagagggcataatcccagtgagaacagtggtttgtctgtaccgcccttagaagattctactcaggtttcagctgtcaatcaacacttccggaaaccggaccaaaaagatctcgcctttctccaacactgggacgaatggttccaatccatgcttgccgagtggatgcctgacaaaggatactgggccgtgaaaactgacctgcacccgtggcaggcacagctgctgcagctcctctatgtgtctgagcagacagaccaaactccacagcagccggtttaagcctcaagcctttttcgttaattcctcttggacatggattttctattctttctgcatccaagtccccaacatgggttcctgcacatggctcggggagcttctcagaagagtttcaggttcttcttcacatggggagaagtacatcagtgagtcagattcaggagaaacctgtccttgggcatgaaatcagtggatttattgaagcctaggtatgcagaattacagaacaagttcaagttagtatatgcataaacctcatggacacacaaagggagccattatttttattcttaatttattcttgagatctgatcttgctgttattccggttggccttgagctcctgcgcttaagtcagtctcctgcctccgcctcctcaagagtcagcactacaaatacatccatgtccaccttggtctcaattttaattatggtttaaaaaaaaatcatatagaaaagtcacggtttcatttaccatctgttgtgtttttaatctgaagtgtctctcacaagttcatgctttgaaatcttgcctctcagccgatggcggtttgaatctgtggagtttttacatgggtcctgacaggcagacataggccagggtgataccttgaaagttatacccagggctggggatttagctcagtggtagagcgcttgcctagcaaacacaaggccctgggtacggtccccagctctgaaaaaaatagaaaaaagaaagttatacccaccacgtgaatagcatgtaccacacactcccgaagtgtagacagattcacatcaccatgcctctctgtgatgatggactgaaacattctgaaaagaatcccaataaacactcttctgtcaagttgcttctggtagatgttttggtcacagtgagttagaagtaactaatacttactggctaccagcctaaccgtcactcagtgtgtggcacggtagtgttaactatgtgcttattcctgacggtatgtacctgtaactttcatcttgcaacctgaaactccacagtccttgagtcacttgaacgaccatagcaatgccacagacggaacgtcccaagtcatagaaaatgtctattttcacagctgtagagggcagaagcccaattggcaggtgcctgcagttctgggggctcttcattgcttggggagaaatagagaaactgttctctattttcaaaagatatttatttattttgtatgtatgtatgtatgaatgcatgtgtatatgtatgtctgtatgcatgcatgtatgtatgtatgcatgtgtgtattatgtatgcatgtgtgtatgtatgtatatgtgtctgggtggcagtggttatagtcccatgaaggcaagtgcttgtggaggcctggggttttaggtgctctgaatctagacctgtgagccacctgacagagatgttgaaactatactcaagttctctggaagaatatttgctcctaatcactgagccatctcgctagtccatccaccgtattttgtgaggcagagtctctcgctgaagctagagcttgctgattgagagactgtctagccaggcagcaccagggattttcctcactctggtctcctcagctgaattccctgggtttcagggatgctctcagcatcggcccctgggtttttaacatagattctggagatgccaagtcaggtcctcaggcttgcagagcaagcacgttaccaagggaaccaattcctcagccctactgctcctgtgagcttgactactctaggtaccgtgggtaggtgaattcgtacaatatttgcttttgtacttggcttatttttattgtcataatgtcttcatggtgtgttattgtgtgacttgtgttaggattttcttttctttttgaagataaataatttacattatatgtggggtccacactttgcccacctccagtggacactgggtagcccctacctcttagacagaggaaatggtgttacagcgaatggcggcatgaagataatataaagatagaattcttttgcacacttcattgagaccttcttcccaagtgattctaggttgggttatgttgatgatcaatgccaacttcagagctggatcctgatgtctgcttaagctgttatcctcttctccatagtaactccatccctttccacttcccacaaagcacagggccgtttgttgacattctcaccagggcctcttagttctccttgctttgataatggctgttctaatgggtgagaggtggggtttggtaatggtgctgttttcctctccatgtaaccgcagatttgctctccttgttgaattctaaatgcttttaaaatacactcttcttttgtgtgtgtatttat

SEQ ID NO: 346 - RNA, 7257 nt, Rattus norvegicus
  source 1..7257: mol_type = mRNA
ataaatacacacacaaaagaagagtgtattttaaaagcatttagaattcaacaaggagagcaaatctgcggttacatggagaggaaaacagcaccattaccaaaccccacctctcacccattagaacagccattatcaaagcaaggagaactaagaggccctggtgagaatgtcaacaaacggccctgtgctttgtgggaagtggaaagggatggagttactatggagaagaggataacagcttaagcagacatcaggatccagctctgaagttggcattgatcatcaacataacccaacctagaatcacttgggaagaaggtctcaatgaagtgtgcaaaagaattctatctttatattatcttcatgccgccattcgctgtaacaccatttcctctgtctaagaggtaggggctacccagtgtccactggaggtgggcaaagtgtggaccccacatataatgtaaattatttatcttcaaaaagaaaagaaaatcctaacacaagtcacacaataacacaccatgaagacattatgacaataaaaataagccaagtacaaaagcaaatattgtacgaattcacctacccacggtacctagagtagtcaagctcacaggagcagtagggctgaggaattggttcccttggtaacgtgcttgctctgcaagcctgaggacctgacttggcatctccagaatctatgttaaaaacccaggggccgatgctgagagcatccctgaaacccagggaattcagctgaggagaccagagtgaggaaaatccctggtgctgcctggctagacagtctctcaatcagcaagctctagcttcagcgagagactctgcctcacaaaatacggtggatggactagcgagatggctcagtgattaggagcaaatattcttccagagaacttgagtatagtttcaacatctctgtcaggtggctcacaggtctagattcagagcacctaaaaccccaggcctccacaagcacttgccttcatgggactataaccactgccacccagacacatatacatacatacacacatgcatacataatacacacatgcatacatacatacatgcatgcatacagacatacatatacacatgcattcatacatacatacatacaaaataaataaatatcttttgaaaatagagaacagtttctctatttctccccaagcaatgaagagcccccagaactgcaggcacctgccaattgggcttctgccctctacagctgtgaaaatagacattttctatgacttgggacgttccgtctgtggcattgctatggtcgttcaagtgactcaaggactgtggagtttcaggttgcaagatgaaagttacaggtacataccgtcaggaataagcacatagttaacactaccgtgccacacactgagtgacggttaggctggtagccagtaagtattagttacttctaactcactgtgaccaaaacatctaccagaagcaacttgacagaagagtgtttattgggattcttttcagaatgtttcagtccatcatcacagagaggcatggtgatgtgaatctgtctacacttcgggagtgtgtggtacatgctattcacgtggtgggtataactttcttttttctatttttttcagagctggggaccgtacccagggccttgtgtttgctaggcaagcgctctaccactgagctaaatccccagccctgggtataactttcaaggtatcaccctggcctatgtctgcctgtcaggacccatgtaaaaactccacagattcaaaccgccatcggctgagaggcaagatttcaaagcatgaacttgtgagagacacttcagattaaaaacacaacagatggtaaatgaaaccgtgacttttctatatgatttttttttaaaccataattaaaattgagaccaaggtggacatggatgtatttgtagtgctgactcttgaggaggcggaggcaggagactgacttaagcgcaggagctcaaggccaaccggaataacagcaagatcagatctcaagaataaattaagaataaaaataatggctccctttgtgtgtccatgaggtttatgcatatactaacttgaacttgttctgtaattctgcatacctaggcttcaataaatccactgatttcatgcccaaggacaggtttctcctgaatctgactcactgatgtacttctccccatgtgaagaagaacctgaaactcttctgagaagctccccgagccatgtgcaggaacccatgttggggacttggatgcagaaagaatagaaaatccatgtccaagaggaattaacgaaaaaggcttgaggcttaaaccggctgctgtggagtttggtctgtctgctcagacacatagaggagctgcagcagctgtgcctgccacgggtgcaggtcagttttcacggcccagtatcctttgtcaggcatccactcggcaagcatggattggaaccattcgtcccagtgttggagaaaggcgagatctttttggtccggtttccggaagtgttgattgacagctgaaacctgagtagaatcttctaagggcggtacagacaaaccactgttctcactgggattatgccctcttttttggattgggagctgtaaaggagcctgagtatggaagccctccttctctcctggactttttacctctgataagtgatcaataaacagtgagggattttgatcatcgccccttcgctgtacaacctgggagggctgtagtactgtggtctctggtaactgcttctgacggcccctagagagatccaaaggaccatttggcgtgtggggtggagagagaggcaatataacggaacagctgctggtgggatctttggaaggagcaagttgaccagtagtcttctgggcagggcactggctgctctcaggcggatgagaagttgcccgagtaccctgttttgggtctgggtgccgtgctctccggttctgaaaccatatatgaattctggattctgggatgcctgtttcttgagccagtttttccctggtaacgatccctgggaatcgattcttctcaaaagcttcgattagaatatcaatctgaaactttgtgaaatgcgtcctgctcctcccagcttctttaactctgggtttatcctgtccttgctcttggctttcttcagagcaacattcaaactctacttgtttccgtatttttctgtgcttctgaaaccaagtcattatttgagactcagagatgccgagtttcttagccagatgtcccctggtagctaagtcaggattgggattcttttcaaaccacacacgaagggtgtccttttgactctggtttagaataatcctccttctccgggcttctttttccagtaggccaccagtgcagttcagatccatgctgcagccacctggatcccacgaggcccaagagagctattcacagagacacaggatgtagcaaagcccagagtggcccacccatcccttaaatacctgttgtttaatcccttcattaaatatgcgacagcactggccaatcttgacagtcaacttgattggattaagaggttcctgggagattagtgaaaccggcctctgggtgtgtctaaggtgtctccagtgaagattagatcataagagagttgagctaatcactggtttaaccctctgatggactgaagtttaggactcctgacagacaatgaactatggatgctgtgtgactttaaaggacaggtcttggccctggaataatgcattcttttctccctctccctctccctctccctctccctctccctctccctctccctctccctctccctctccctctccctcttcctctccctccctctctccctctctccctccctccctctctccctctctccctctctccctctctccctctctccctcttctacatatccaagaaaaatgaacctcagactcactaccacaatgccatgatattctgcctgaccttgggcccacagcaatggaccccccatgatcacagatagagctctgaactagtgagcaagaaatgaattcttcctctcttaagctgtctctgtgggggcacttgttagagcaatgtaaaatttgactaaaacagccacctaagaggaatttgaagtaattaccacaaaggagaagctgaatttggaggaaagtacagattcttctgggtaattctgcctcctccataacacctctccatgttttacttctgagctctctaggttgtacctgcatgttatttctataatccttgatctcctcctcctcctccccctccccattgtttgctgtgcttgggatggaagccagtctcagacaggctgggtaaggaagtcttctgtcactgagctgcagtcctgggccctcctattcctttccggttgtcttatctcttaatcacctggacttggccatattgtgtaatatactaggagtctcccctttttccttatgtttcaactttttctcatcttctgctagaacacatttctgcttttgttctgcccttgctgacctgattgtacacccaagaagccagcctaagctctctggggtattgactcaacctcagtgtgggtgtgccgtgaatgggcttgggaaatgtgattaaagagaagaactaggttccttaatccagtagggtggggttaaccgtctaagtaggaaggggaaacagtatagctgaagacctcacctggagagggtcaaggatgtagagccaccagcactgtggctctggccaagtcccagcctgcttccctctcctttcttagcctgtcctgctgctatacatgtgcatatgtgtgcacattatatatacgtgctttatgagcatgcttatatgcagacttgaaagactcttccattaccttctctagcgatacaccgtatattaataacagataactccagaggcctgcgaggtggctgagcaggtcaaggtgcttgctgctaaatcctgacaatctgagagaggcaactcccacaagaggtcctctgacatttacagatgccatagcaccaatgtgccccaccccatacacacgcaagcaaaggaatgagtgaatgaaagaataaataactttacatagccacattctacgtttggtaaggaaagaatgaacctcacccaagagccttgtcctcctgagtaaatgtgttcgcaggggagaagtatagacagatagaactatgatcttgctgtttttatatgcatctatgaatagcttagaagagacataggcatgccaagtttgcatggctattgtgcctctgttgaaagcaacagttgaattaaaactgctagtgaggaataatttcagttgtctctgctgctaaagaagaaagagacagttggtgcttcggtgagtctaataggctcgggatatttgagaaacaaacttagttacctttctgggtgtgataaatctaccctgacgcaagcaatttaagaaaggaagagttcattttggctcacagttccagggcacagtccaccatgcagggatgtcggggcagcaggagcctgaagcagctggtcatactgtttccgaagtcaggaggaagacagccatgggcgccgctgctcggagccacttctccgttttaacgcagtccagaacccaagcactatgtcccgggaatggagtaccctgcttgaagtgggccttctcgctttagtaacctaatcgagagaatcgctcacagatgtgtcaggctttttccttctaggtgcgtaccaaacctgtagaggtgatccattcaatcacagcaatcctacgaaagctaaggctttaccacagggggtctgttctaccgttgagttttctagtatgttttatattatagtcagacattaatgtcttaaagattacttgctgaccccttaatattgccaattttctactgactgtagccaaaacttacatttcatacgcacgtaatgttaaaaatatatatatatatatattttgtcgacaaaagataatattcttgtggcttgggataaaacacattgttgtgttcacttaaaaaataattaagaaagcaaaagttaaaaaaaaaaaaagcaaaaaccctgggagcccctgtacctagatgcaattggttgcattaattaacctttatggagtgtgttacagatatctgtgtatgatacgagtgttagttttaaaaaagccacgtgactaaactaatgaaaaaaaatacgtgtgtggaaaaatactacctcgacccacaggaacctacccgaacggcaaagcaaggaaagacccagtagccgttcctcccctcccatgtaattgcaattacaggaatcagggatcgagcctgggtgtttcagtcaagcagcagaaattacctaattagggcactcgcatctgaaactgaaggatgtggagaacatctctccagcagcaacttggtgtcccactgatactacctcgtcctcttcgtagtctcctcctctccccactccacatacccacttccccactgtatcagaagggaaaatgtttgctttctggggtaagatggcggattggacgcttcctccattcaactccgagatagaagagtcagagtaacaaaggatagaccatatcctcgggacggaaagaaagaatgagcatcagaaagaggtgacaagacagatgaaaaaggacggtaaaatagaaaaactaaggcaaggacaggcggaagcaatctgcagccccaatcgccgcagggggaaagaagagtcagagccccaaccactcgtaagcctgtcagccttggtgacaaaagactggcagtcccagctgcaggataaaccctcagtactagcaagccttaatccaggggggagagggaaggggggaggggaaataatgcctcctccggtggggcccgttagctgcggaaaaaaaaaaaaaatcctgcatccaatcccggcatccaaacccctacccaacccggtgcttcaggagtgctgcaccagatgcctagcggagaaaggatctattgtttgagaccaggctactctgggactctgaaaacaaggaacagtcagtcacaagtcagagagcatggggccactctgccatagagccagagtgacagcccgctaccagacgcagatgcagagggggcgggtcggacgtgggccggctgggaagttttaggggcgggagctcagcggaggcgccccctccctgagtgctgggagccggg

SEQ ID NO: 347 - RNA, 1290 nt, Macaca mulatta
  source 1..1290: mol_type = mRNA
caaggatctgctacttctcagattcttccacatgaccagcactgacaactgtccgcgaaattccggccaggtctcccctccatggctctcccgacaccttccgacagcacccttcccgcggaagcccgaggacgaggacggcgaaggagactcgtttggaccccgagccaaagggaggccctgcgagcctgctttgagcggaaccagtacccgggcatcgccaccagagaacagctggcccaggccatcggcattccagagcccagggtccagatctggtttcagaatgagagatcacgccagctgaggcagcacctgcgggaatctcggccctggcccgggaaacgaggccagcaagaaggcaggcgaaagcggaccgccgtcacccggtcccagactaccctgctcctcagagccttccggcagcgtcgctttccaggcatcgccaccagggaagaactggccagagagacgggcctcccggagtcccgcattcagatttggtttcagaaccggagggccaggcatctgggccagggtagcagggcaccggcgcacgcaggcggcctgtgcaaggcggcccccggggggtgtccccccgttccctcgtcagtagccttcacccacctcggggcgtggggaacggggcttcccgcactccacatgccctgcgcgcctggggctcaggggnnacaggggcccctgctccagcccagccaggctgcgcaggcagcaggaatctctgcacctgcccctgcanctcggggctttgtgttgggtgccctggctcctctggaagtgggactgtcccaccctccggctcctcggtggcctctgcaccgcaacaaatgccagaaagaccaggacccgcagcgcggtggcctgctgggtgcgtgctcggtgggacagcctgggcccgctcgagctgagtcacaggaccaaggtgtgcttgagccacccacgtcccaggggagtcgctggtggggctggagccccaggnntcgctgcagggcagctccacctcctgagccccagaccccggacgcctccgcgtgtcaggcacagatgcaagccatccaggcgccctcccaaccgctccaaaagcttcagcgctagtctgcactcccctccagcctgttagatgagctcctgtcgncagagtttcagcaaaatgcacaacctttcctagatccggcgccactgggggagctgaaggacgtggaagagcccgctccgctggaatcactcctcaaccaggaggcacaccgggctctgctggaggagctttag

SEQ ID NO: 348 - RNA, 1290 nt, Macaca mulatta
  source 1..1290: mol_type = mRNA
ctaaagctcctccagcagagcccggtgtgcctcctggttgaggagtgattccagcggagcgggctcttccacgtccttcagctcccccagtggcgccggatctaggaaaggttgtgcattttgctgaaactctgncgacaggagctcatctaacaggctggaggggagtgcagactagcgctgaagcttttggagcggttgggagggcgcctggatggcttgcatctgtgcctgacacgcggaggcgtccggggtctggggctcaggaggtggagctgccctgcagcganncctggggctccagccccaccagcgactcccctgggacgtgggtggctcaagcacaccttggtcctgtgactcagctcgagcgggcccaggctgtcccaccgagcacgcacccagcaggccaccgcgctgcgggtcctggtctttctggcatttgttgcggtgcagaggccaccgaggagccggagggtgggacagtcccacttccagaggagccagggcacccaacacaaagccccgagntgcaggggcaggtgcagagattcctgctgcctgcgcagcctggctgggctggagcaggggcccctgtnncccctgagccccaggcgcgcagggcatgtggagtgcgggaagccccgttccccacgccccgaggtgggtgaaggctactgacgagggaacggggggacaccccccgggggccgccttgcacaggccgcctgcgtgcgccggtgccctgctaccctggcccagatgcctggccctccggttctgaaaccaaatctgaatgcgggactccgggaggcccgtctctctggccagttcttccctggtggcgatgcctggaaagcgacgctgccggaaggctctgaggagcagggtagtctgggaccgggtgacggcggtccgctttcgcctgccttcttgctggcctcgtttcccgggccagggccgagattcccgcaggtgctgcctcagctggcgtgatctctcattctgaaaccagatctggaccctgggctctggaatgccgatggcctgggccagctgttctctggtggcgatgcccgggtactggttccgctcaaagcaggctcgcagggcctccctttggctcggggtccaaacgagtctccttcgccgtcctcgtcctcgggcttccgcgggaagggtgctgtcggaaggtgtcgggagagccatggaggggagacctggccggaatttcgcggacagttgtcagtgctggtcatgtggaagaatctgagaagtagcagatccttg

SEQ ID NO: 349 - RNA, 2989 nt, Homo sapiens
  source 1..2989: mol_type = mRNA
ataaactgggtgacagagtcagaaaactccccagctaaacacccgtaagacttcatacaacacaatactctatactgtgatgatcacagctgccaaggctacctaaaagaagacagttatctcatatttggctgccagctttttatctttctctcgaccacttaaaacttcagacttcctgtcctgctggtatcatggagaaagtccaatacctcactcgctcagctataagaagagcctcaaccattgaaatgcctcaacaagcacgtcaaaagctacagaatctatttatcaatttctgtctcatcttaatatgtctcttgctgatctgtatcatcgtgatgcttctctgaagttctgctacaacctctagatctgcagcttgccacatcagcttaaaatctgtcatcccatgcagacaggaaaacaatattgtataacagaccacttcctgagtagaagagtttctttgtgaaaaggtcaagattaagactaaaacttattgttaccatatgtattcatctgttggatcttgtaaacatgaaaagggctttattttcaaaaattaacttcaaaataagtgtataaaatgcaactgttgatttcctcaacatggctcacaaatttctatcccaaatcttttctgaagatgaagagtttagttttaaaactgcactgccaacaagttcacttcatatataaagcattatttttactcttttgaggtgaatataatttatattacaatgtaaaagcttctttaatactaagtatttttcaggtcttcaccaagtatcaaagtaataacacaaatgaagtgtcattattcaaaatagtccactgactcctcacatctgttatcttattataaagaactatttgtagtaactatcagaatctacattctaaaacagaaattgtattttttctatgccacattaacatcttttaaagttgatgagaatcaagtatggaaaagtaaggccatactcttacataataaaattccttttaagtaattttttcaaagaatcacagaattctagtacatgtaggtaaatcataaatctgttctaagacatatgatcaacagatgagaactggtggttaatatgtgacagtgagattagtcatatcactaatatactaacaacagaatctaatcttcatttaaggcactgtagtgaattatctgagctagagttacctagcttaccatactatatctttggaatcatgaaaccttaagacttcagaatgattttgcaggttgtcttccattccagcctaacatccaatgcaggcaaggaaaataaaagatttccagtgacagaaaaatatattatctcaagtattttttaaaaatatatgaattctctctccaaatattaactaattattagattatattttgaaatgaacttgttggcccatctattacatctacagctgacccttgaacatgggggttaggggagctgacaattcgtgggtccgcaaaatcttaactacctaatagcctactattgaccataaaccttactgataacataaacagtaaattaacacatattttgcgtgttatatgtattatacactatattcctacaataaagtaagctagagaaaatgttatttagaaaatcataagaaagagaaaatatatttactattcattaaatggaagtgggtcaacataaaagtcttcattctcattgtcttcacattgagtaggcagaggaggagaaagatggggaggaagagaaggcgttggtcttgcagtcttgtcttaggggtgtggggagtgggggaaagaatattcatgtataagtggacccttgcaattcaagcccttgttgttcaagggtcaactgtaataggatatagctatttttcttcctctatcaaccaaatggtaagcatctattttgcagtccactctactgagctaaattatagatccagctatgctatttataattattttcttgatgaataaattttcaatttctcctctgaccatttcagaacatcttccaataactcataaaacaactgaagtaaaattgagtgctggaaaatatattcaccaaactttggtaatttaagttgactaaagtttaaaattaagtctaaaatagtttacacctatactgcataatccaacaattttaatttcagttgaagacatgttactaatataactattattaaaagagtagaggatgtgtaattaaccatatcttctaaaacatggttactaaaagaatatgtaacatcaatattgaccttggtttcttacacaagtgttgctaactcaatagtgaaggagacactattaaattttctgaacccatgagagatactagagatggggagtggaaagtgtttggttcagggatatctgaagaacagaagggcagagatttcttaagtgacgcctcatctacaagctggaaattcctaaaaacaagtagaaagcttataaacaacaggtgatacactcacctcactggttttagtaaattaccaatacagaaagtatccctagtcttaaaaacaagtggaaaatttgaactgattagtcatattcctttgattacactgtttgttacaatatttttctcagtaaacagaaataactaatttttttgttcttcattctttgatagaaattaaaatcttattctgtgaggattacagaatactataactcaaattataaagtagaataaactctttaaataattattcttcatcataaagtgtaaagaataagatataagaaaacaatttatttttaaaatttaatatactaaatgctcaaatatgttctactatagaataagttcttatcttaatttacagggcactaaaaacaattttaaaatgcttaatgttgccttttatattttaattggttaagaatatatatttgtttaatgcaaatcagaatcactatattaaaatgaatgttcttgaaaactca

SEQ ID NO: 350 - RNA, 2989 nt, Homo sapiens
  source 1..2989: mol_type = mRNA
tgagttttcaagaacattcattttaatatagtgattctgatttgcattaaacaaatatatattcttaaccaattaaaatataaaaggcaacattaagcattttaaaattgtttttagtgccctgtaaattaagataagaacttattctatagtagaacatatttgagcatttagtatattaaattttaaaaataaattgttttcttatatcttattctttacactttatgatgaagaataattatttaaagagtttattctactttataatttgagttatagtattctgtaatcctcacagaataagattttaatttctatcaaagaatgaagaacaaaaaaattagttatttctgtttactgagaaaaatattgtaacaaacagtgtaatcaaaggaatatgactaatcagttcaaattttccacttgtttttaagactagggatactttctgtattggtaatttactaaaaccagtgaggtgagtgtatcacctgttgtttataagctttctacttgtttttaggaatttccagcttgtagatgaggcgtcacttaagaaatctctgcccttctgttcttcagatatccctgaaccaaacactttccactccccatctctagtatctctcatgggttcagaaaatttaatagtgtctccttcactattgagttagcaacacttgtgtaagaaaccaaggtcaatattgatgttacatattcttttagtaaccatgttttagaagatatggttaattacacatcctctactcttttaataatagttatattagtaacatgtcttcaactgaaattaaaattgttggattatgcagtataggtgtaaactattttagacttaattttaaactttagtcaacttaaattaccaaagtttggtgaatatattttccagcactcaattttacttcagttgttttatgagttattggaagatgttctgaaatggtcagaggagaaattgaaaatttattcatcaagaaaataattataaatagcatagctggatctataatttagctcagtagagtggactgcaaaatagatgcttaccatttggttgatagaggaagaaaaatagctatatcctattacagttgacccttgaacaacaagggcttgaattgcaagggtccacttatacatgaatattctttcccccactccccacacccctaagacaagactgcaagaccaacgccttctcttcctccccatctttctcctcctctgcctactcaatgtgaagacaatgagaatgaagacttttatgttgacccacttccatttaatgaatagtaaatatattttctctttcttatgattttctaaataacattttctctagcttactttattgtaggaatatagtgtataatacatataacacgcaaaatatgtgttaatttactgtttatgttatcagtaaggtttatggtcaatagtaggctattaggtagttaagattttgcggacccacgaattgtcagctcccctaacccccatgttcaagggtcagctgtagatgtaatagatgggccaacaagttcatttcaaaatataatctaataattagttaatatttggagagagaattcatatatttttaaaaaatacttgagataatatatttttctgtcactggaaatcttttattttccttgcctgcattggatgttaggctggaatggaagacaacctgcaaaatcattctgaagtcttaaggtttcatgattccaaagatatagtatggtaagctaggtaactctagctcagataattcactacagtgccttaaatgaagattagattctgttgttagtatattagtgatatgactaatctcactgtcacatattaaccaccagttctcatctgttgatcatatgtcttagaacagatttatgatttacctacatgtactagaattctgtgattctttgaaaaaattacttaaaaggaattttattatgtaagagtatggccttacttttccatacttgattctcatcaactttaaaagatgttaatgtggcatagaaaaaatacaatttctgttttagaatgtagattctgatagttactacaaatagttctttataataagataacagatgtgaggagtcagtggactattttgaataatgacacttcatttgtgttattactttgatacttggtgaagacctgaaaaatacttagtattaaagaagcttttacattgtaatataaattatattcacctcaaaagagtaaaaataatgctttatatatgaagtgaacttgttggcagtgcagttttaaaactaaactcttcatcttcagaaaagatttgggatagaaatttgtgagccatgttgaggaaatcaacagttgcattttatacacttattttgaagttaatttttgaaaataaagcccttttcatgtttacaagatccaacagatgaatacatatggtaacaataagttttagtcttaatcttgaccttttcacaaagaaactcttctactcaggaagtggtctgttatacaatattgttttcctgtctgcatgggatgacagattttaagctgatgtggcaagctgcagatctagaggttgtagcagaacttcagagaagcatcacgatgatacagatcagcaagagacatattaagatgagacagaaattgataaatagattctgtagcttttgacgtgcttgttgaggcatttcaatggttgaggctcttcttatagctgagcgagtgaggtattggactttctccatgataccagcaggacaggaagtctgaagttttaagtggtcgagagaaagataaaaagctggcagccaaatatgagataactgtcttcttttaggtagccttggcagctgtgatcatcacagtatagagtattgtgttgtatgaagtcttacgggtgtttagctggggagttttctgactctgtcacccagtttat

SEQ ID NO: 351 - RNA, 2480 nt, Mus musculus
  source 1..2480: mol_type = mRNA
acctactgcagctgctcccataaacctgggaacagaaaactgcccagctaagctcccataagacttcatacagcttcatgctctgcactgtgacgatcaccgaagccaagacagaagcaggtgaagagactctgacgcttcagtctgcacaacaaagctgggaccaaaggaacttgccagcttacaattctgcagtcttaaaggggcttcatcccagtgagctttcctgcgtaacaggtctcctaaaagaagacagctcacatttggctgcctgttgtcaactttttatctttctcttgaccacttagaaaaacttgtctccctacttttgccttcctggcataatggaaaaagtgcaatacctcactcgctcggctatcaggagagcctccactattgaaatgcctcagcaagcacgtcagaatctccagaacctatttatcaatttctgcctcatcttgatatgtctgctgctgatctgcatcattgtgatgcttctgtgaagagctgccgccactccagacctgcaacatgccaactcagcttaaagccgagcactccgtcatgggggaagcaacgcaccgctgccttccggctgagaacagctttgtgagggtcacgattaagagtgaaactaattgttagccagtgtattcatctgctggatcttgtaaacaaactttacagtggctaagtgtgcataatgtagctgccaatttcctcaacatggctcataaatttctttcctaaatatttctgacaatgaagtatgagttttaattttgaaacaccactaccaaaaaagttcactttctatatccaactctagcaaggtcactttatagctccagtctggggaataaatggaatatatactgcattgccactaccttttttataggaactaagtgttcttcagttctccacaaagtagaaaatagtcatttaaatgaagtgttcttattgaaaatagctcactgggtcctcacatagatgacacaatgatgacgatgatgatgatgacgacgatgatgatgatgacgacgattcaaatctcttggtcactactgtcagaacaaataccttgaaaaaatgttgtgccctttttctacacactagtatttttaagcttatgagagttaaagggggaaatgtaagaacatattctcatataaaattattcactaattttgctcaagggctgtgtacatgtacatgtacattaaccacaaatctgctctctctagggtttgatcaacaagcaggaacatcttgctgtgttggctgtgataatcactaaagatccagagtctcacctgaagcttgtcgctctcatgtatctccttggtttaatagcgtttctcaaataatgaagataacagtaataaccaagctgtagtaagacacagctctttcttttcctgatctcccagagaggaagtggttgtcccctaactttagaagtagaactagagagctagtgtataattcttactgaccatggtttcaatttccctttctaagtttctactatctctcaataactactaaaatagaagcaaaaaatagattggaaaatatattcaccaaaatttagtgacttaaactggatcaagtacaaaacagtttatgcctaactttgcaaacccacaatttttaagtccagttcaaaacatgctactaacatagcaattattaaggaagagaattgtaattagatatattttccataaccattactacaaagacataaaacatcagtattcactttggtctttagcagagcagctgaaggctgctgatttaaactgtttgaacccctggtagaaaggaagctgttcgggttcagaaattatctaaagagtagcccctaaaggagtccaatggtaacagggggtctcttcataaaggctggaggggcccatcacagaaactataaaacatggatgacatcatctctaactcagtggtatttaacgttccctttctgacgctgtggcccttttatatagttcctcatgttgtggtgatacccaacaataaaatcatttttgttgctatttcataactgtaatttcgcctccttacctccactatgaattgtaaatattttggaaacaggtttgcatgaggggttgcaacccacaggttgagaaccactggtaagaggtctgtaaaaaatacataagttgtgtagttggccatgctgagagaaacgtgacgctgaagctgaaaagcaccaggcatttgttatattgctcactaccacatcaacttcaaggtataaactgtcagctcataaggctcttctcattaaacatttaatgctgccttttacatttttagtagtttatttgtagtttatctgtaactgtttatctgtaaaatgaaattggaatgacctatattcaaatggagttttgattttggtgaaattactatacaattatattctattgactataaaatgttgtcttgtt

SEQ ID NO: 352 - RNA, 2480 nt, Mus musculus
  source 1..2480: mol_type = mRNA
aacaagacaacattttatagtcaatagaatataattgtatagtaatttcaccaaaatcaaaactccatttgaatataggtcattccaatttcattttacagataaacagttacagataaactacaaataaactactaaaaatgtaaaaggcagcattaaatgtttaatgagaagagccttatgagctgacagtttataccttgaagttgatgtggtagtgagcaatataacaaatgcctggtgcttttcagcttcagcgtcacgtttctctcagcatggccaactacacaacttatgtattttttacagacctcttaccagtggttctcaacctgtgggttgcaacccctcatgcaaacctgtttccaaaatatttacaattcatagtggaggtaaggaggcgaaattacagttatgaaatagcaacaaaaatgattttattgttgggtatcaccacaacatgaggaactatataaaagggccacagcgtcagaaagggaacgttaaataccactgagttagagatgatgtcatccatgttttatagtttctgtgatgggcccctccagcctttatgaagagaccccctgttaccattggactcctttaggggctactctttagataatttctgaacccgaacagcttcctttctaccaggggttcaaacagtttaaatcagcagccttcagctgctctgctaaagaccaaagtgaatactgatgttttatgtctttgtagtaatggttatggaaaatatatctaattacaattctcttccttaataattgctatgttagtagcatgttttgaactggacttaaaaattgtgggtttgcaaagttaggcataaactgttttgtacttgatccagtttaagtcactaaattttggtgaatatattttccaatctattttttgcttctattttagtagttattgagagatagtagaaacttagaaagggaaattgaaaccatggtcagtaagaattatacactagctctctagttctacttctaaagttaggggacaaccacttcctctctgggagatcaggaaaagaaagagctgtgtcttactacagcttggttattactgttatcttcattatttgagaaacgctattaaaccaaggagatacatgagagcgacaagcttcaggtgagactctggatctttagtgattatcacagccaacacagcaagatgttcctgcttgttgatcaaaccctagagagagcagatttgtggttaatgtacatgtacatgtacacagcccttgagcaaaattagtgaataattttatatgagaatatgttcttacatttccccctttaactctcataagcttaaaaatactagtgtgtagaaaaagggcacaacattttttcaaggtatttgttctgacagtagtgaccaagagatttgaatcgtcgtcatcatcatcatcgtcgtcatcatcatcatcgtcatcattgtgtcatctatgtgaggacccagtgagctattttcaataagaacacttcatttaaatgactattttctactttgtggagaactgaagaacacttagttcctataaaaaaggtagtggcaatgcagtatatattccatttattccccagactggagctataaagtgaccttgctagagttggatatagaaagtgaacttttttggtagtggtgtttcaaaattaaaactcatacttcattgtcagaaatatttaggaaagaaatttatgagccatgttgaggaaattggcagctacattatgcacacttagccactgtaaagtttgtttacaagatccagcagatgaatacactggctaacaattagtttcactcttaatcgtgaccctcacaaagctgttctcagccggaaggcagcggtgcgttgcttcccccatgacggagtgctcggctttaagctgagttggcatgttgcaggtctggagtggcggcagctcttcacagaagcatcacaatgatgcagatcagcagcagacatatcaagatgaggcagaaattgataaataggttctggagattctgacgtgcttgctgaggcatttcaatagtggaggctctcctgatagccgagcgagtgaggtattgcactttttccattatgccaggaaggcaaaagtagggagacaagtttttctaagtggtcaagagaaagataaaaagttgacaacaggcagccaaatgtgagctgtcttcttttaggagacctgttacgcaggaaagctcactgggatgaagcccctttaagactgcagaattgtaagctggcaagttcctttggtcccagctttgttgtgcagactgaagcgtcagagtctcttcacctgcttctgtcttggcttcggtgatcgtcacagtgcagagcatgaagctgtatgaagtcttatgggagcttagctgggcagttttctgttcccaggtttatgggagcagctgcagtaggt

SEQ ID NO: 353 - RNA, 2254 nt, Rattus norvegicus
  source 1..2254: mol_type = mRNA
aaagctgcgcagctgagctcccagacttcacacaactaaacagtctgcattgtgacgatcacagaagccaaggcctcctaaaaggagacagctcgcgtttggctgcctgctgtcaactttttatctttctcttgactacttaaaaaagacttgtcttcctacttttgtcttcctggcatcatggaaaaagtccaataccttactcgctcggctatcaggagagcctcgactattgaaatgccccagcaagcgcgtcagaacctccagaacctctttatcaatttctgtctcatcttgatatgtctgctgctgatctgcatcattgtgatgcttctgtgacaagctgtcgccaccgcagacctgcaccatgccaacgcagcttacaacctggccctccaccacgagggaggcagtgccgccgccttcctgctggacatcgtcgtgaaggtcacgattaagagtgagactgatggcagccagtgtgatcatcggctggatcttgtaaactttaccacgactaagtgtgcacaatgtagctgcccgtttcctcagtgtggctcataaatgtctttcctaaatacttctgacattgtagtatgagttttaattttgaaacagcactacaaaaaaagttcactttctatatccagcactagaaagttcaacttatagcttcagtttggggaataaatgaaatttaaactgcgttgccaccactttttttttataggaactaaatattcttcaggtctgcacaaagtagaaaataataatttaaatgaagtgttcttattcaaaatagctcactgggtcctcatatagacgacgatgacgatgaccatgacgatgacaatgattcagaagtcatggtcattactgtcagaacacataccttgaaaaaaggttgtgccctttttctaaacactaattatttttaagcttatgagagtcaaatagggaaatgtaaaagcatattctcatataaaaatcttcactaatttttccactaattgtggaattcaagcacatttacattaaccacaaatgtgctctctctagggtttgaccagcaagcaagaacatcttactgtgtggttgcgataatcactaaaacatcagaacctcacccgaaggttggcttggcacagatctcctgggttgtgccgggcttctccagataataaatgataacaacaaaccagacagctgtgctggggtacagctctcttcctgcatcccccagagaggagaggcttgctctcctaacttaaaaactagagattctattttacaatccttactaatcacggtttcaatttccctttctaaattcctaatatctctcaataaatactaaaagattaggagctaaaaactgtattggaaaacattcaccaaaatttagttaacttaagttatccaatacaaaacagttcacacctctcctgtgcactcccacagttcacacctctcctgtgcactcccacagtgttaagtccagctcaaggcattctaccaacacagcagctattaggagagttataattagatatattttccataatgattactacgaagatacggcgcatcagtattcaccttggtccctaacagagcagctgaaggcatgctgattcgaactgtttgaatccctgatagaaaggaagatgtctggtttcagaaattatccaaagagtagcccacaaaggagtcccacgttaataggcgtctcttcagaaaaggctgggggtgagggtgcccatcacagaaactataaaacatggatgacataatctctaaatcaatgttccctttgtgatgctatgaccctttcatatagttcctcatgttgtggtgaaacccaacaataaaattatttttgttgctattccataactgtaattttgcctccactatgaattgcgaatatttgtgtagacaaaggtttgcgtgaggggttgcaacgcacaggttgagaagcactggtgaatggtctgcggaattatgtacaagtgcataagttcgtagttgccatgctgagaggaaaaggaaggtgaaaagcgcctggccctttacattctcactaccacaccaactgtcaactcataagttcttctcatcaaacatttaatgtttaatgccttttacatttcagtagttaaatgtttatctataaaatgcaataagaatggcctatattcagatgggattatgattttggtgcaattgctatacaattaaatgctattactat

SEQ ID NO: 354 - RNA, 2254 nt, Rattus norvegicus
  source 1..2254: mol_type = mRNA
atagtaatagcatttaattgtatagcaattgcaccaaaatcataatcccatctgaatataggccattcttattgcattttatagataaacatttaactactgaaatgtaaaaggcattaaacattaaatgtttgatgagaagaacttatgagttgacagttggtgtggtagtgagaatgtaaagggccaggcgcttttcaccttccttttcctctcagcatggcaactacgaacttatgcacttgtacataattccgcagaccattcaccagtgcttctcaacctgtgcgttgcaacccctcacgcaaacctttgtctacacaaatattcgcaattcatagtggaggcaaaattacagttatggaatagcaacaaaaataattttattgttgggtttcaccacaacatgaggaactatatgaaagggtcatagcatcacaaagggaacattgatttagagattatgtcatccatgttttatagtttctgtgatgggcaccctcacccccagccttttctgaagagacgcctattaacgtgggactcctttgtgggctactctttggataatttctgaaaccagacatcttcctttctatcagggattcaaacagttcgaatcagcatgccttcagctgctctgttagggaccaaggtgaatactgatgcgccgtatcttcgtagtaatcattatggaaaatatatctaattataactctcctaatagctgctgtgttggtagaatgccttgagctggacttaacactgtgggagtgcacaggagaggtgtgaactgtgggagtgcacaggagaggtgtgaactgttttgtattggataacttaagttaactaaattttggtgaatgttttccaatacagtttttagctcctaatcttttagtatttattgagagatattaggaatttagaaagggaaattgaaaccgtgattagtaaggattgtaaaatagaatctctagtttttaagttaggagagcaagcctctcctctctgggggatgcaggaagagagctgtaccccagcacagctgtctggtttgttgttatcatttattatctggagaagcccggcacaacccaggagatctgtgccaagccaaccttcgggtgaggttctgatgttttagtgattatcgcaaccacacagtaagatgttcttgcttgctggtcaaaccctagagagagcacatttgtggttaatgtaaatgtgcttgaattccacaattagtggaaaaattagtgaagatttttatatgagaatatgcttttacatttccctatttgactctcataagcttaaaaataattagtgtttagaaaaagggcacaaccttttttcaaggtatgtgttctgacagtaatgaccatgacttctgaatcattgtcatcgtcatggtcatcgtcatcgtcgtctatatgaggacccagtgagctattttgaataagaacacttcatttaaattattattttctactttgtgcagacctgaagaatatttagttcctataaaaaaaaagtggtggcaacgcagtttaaatttcatttattccccaaactgaagctataagttgaactttctagtgctggatatagaaagtgaactttttttgtagtgctgtttcaaaattaaaactcatactacaatgtcagaagtatttaggaaagacatttatgagccacactgaggaaacgggcagctacattgtgcacacttagtcgtggtaaagtttacaagatccagccgatgatcacactggctgccatcagtctcactcttaatcgtgaccttcacgacgatgtccagcaggaaggcggcggcactgcctccctcgtggtggagggccaggttgtaagctgcgttggcatggtgcaggtctgcggtggcgacagcttgtcacagaagcatcacaatgatgcagatcagcagcagacatatcaagatgagacagaaattgataaagaggttctggaggttctgacgcgcttgctggggcatttcaatagtcgaggctctcctgatagccgagcgagtaaggtattggactttttccatgatgccaggaagacaaaagtaggaagacaagtcttttttaagtagtcaagagaaagataaaaagttgacagcaggcagccaaacgcgagctgtctccttttaggaggccttggcttctgtgatcgtcacaatgcagactgtttagttgtgtgaagtctgggagctcagctgcgcagcttt

SEQ ID NO: 355 - RNA, 846 nt, Macaca mulatta
  source 1..846: mol_type = mRNA
cagttatctcatatttggctaccagctttttatctttctctcaatcacttaaaacttcagacttcctctcctgctggtatcatggagaaagtccaatacctcactcgctcagctataagaagagcctcaaccattgaaatgcctcaacaagcacgtcaaaatctacagaatctatttatcaatttctgtctcatcttaatatgtctcttgctgatctgtatcatcgtgatgcttctctgaagttctgctacaacctctagatctgcaacttgccacatcagcttaaaatctgtcatcccatgcagacgggaaaacaatactgtaaaacagaccacttcctgagtagaagagtttctttgtgaaaaggtcaagattaagactaaaacttattgttagcaaatgtattcatctgctggatcttgtaaacatgaaaagggctttattttcaaaaattaactttaaaataagtgtataaaatgtaactgttgatttcctcaacatggctcacaaatttgtatcccaaatcttttctgaagatgaaataagagtttagttttgaaactgcactgccaacaagttcacttcatatataaagcattatctttactcttttgaggtgaatataacttatattacactgtaaaagcttctttaatactatttttcaagtcttcaccaagtatcaaagtaataacacaaatgaagtgtcattattcagaacagtccactgactcctcacatctgttatcttattataaagaactctgtagtaactctttgtagtaacattctaaaacagaaattgcatttttgctatgccacattaacattttttaaagttgatga

SEQ ID NO: 356 - RNA, 846 nt, Macaca mulatta
  source 1..846: mol_type = mRNA
tcatcaactttaaaaaatgttaatgtggcatagcaaaaatgcaatttctgttttagaatgttactacaaagagttactacagagttctttataataagataacagatgtgaggagtcagtggactgttctgaataatgacacttcatttgtgttattactttgatacttggtgaagacttgaaaaatagtattaaagaagcttttacagtgtaatataagttatattcacctcaaaagagtaaagataatgctttatatatgaagtgaacttgttggcagtgcagtttcaaaactaaactcttatttcatcttcagaaaagatttgggatacaaatttgtgagccatgttgaggaaatcaacagttacattttatacacttattttaaagttaatttttgaaaataaagcccttttcatgtttacaagatccagcagatgaatacatttgctaacaataagttttagtcttaatcttgaccttttcacaaagaaactcttctactcaggaagtggtctgttttacagtattgttttcccgtctgcatgggatgacagattttaagctgatgtggcaagttgcagatctagaggttgtagcagaacttcagagaagcatcacgatgatacagatcagcaagagacatattaagatgagacagaaattgataaatagattctgtagattttgacgtgcttgttgaggcatttcaatggttgaggctcttcttatagctgagcgagtgaggtattggactttctccatgataccagcaggagaggaagtctgaagttttaagtgattgagagaaagataaaaagctggtagccaaatatgagataactg

SEQ ID NO: 357 - RNA, 5785 nt, Homo sapiens
  source 1..5785: mol_type = mRNA
ctttctctcgccgcgccgtcttgaagccgcgcgggctcgtgagcagcgcgaggccgccaaggtgcctcgcttcgccggagccgctgccgcccgccggagggaagccggcctcgggcgcgcacgctcgtcggagccccggcgcgccccgcgcctgagcctgctgacagcggccgctgggctcaggctgtccgctctgggctccgcggcctcggccccgctgcactccacctccgccccctcggactccctcccctctgcttctactcctcctgctccagtgcggatcgtttcgcaactgcttgccactcgtcccgtgcctggctgtttttccatttcccggccccctcttcttgagtactttaccccctgcatttggggacagggactggaaaaggggcgggtggagcgtccagtggagaagaaggaagcgaggcccgcaggaggaggaggatcggcggactgtggggaggagaccccacgccaccctttctggtcatctcccctcccgccccgcccctgcgcacactccctcgcgggcgagctactttcggaccaggaaagtaagagcggccctgggtgacagcgccgcggggccagtcccggggttagccgcgcgtctgctcgcttctggtccgtcgcgctcccagccagggcacagcccggaccgaggatggcttcgaccacaacctgcaccaggttcacggacgagtatcagcttttcgaggagcttggaaagggggcattctcagtggtgagaagatgtatgaaaattcctactggacaagaatatgctgccaaaattatcaacaccaaaaagctttctgctagggatcatcagaaactagaaagagaagctagaatctgccgtcttttgaagcaccctaatattgtgcgacttcatgatagcatatcagaagagggctttcactacttggtgtttgatttagttactggaggtgaactgtttgaagacatagtggcaagagaatactacagtgaagctgatgccagtcattgcattcagcagatcctggaggctgtgctacactgccatcagatgggcgtggtccatcgggacctgaagcctgagaatttgcttttagctagcaaatccaagggagcagctgtgaaattggcagactttggcttagccatagaagttcaaggggaccagcaggcgtggtttggttttgctggcacacctggatatctttctccagaagttttacgtaaagatccttatggaaagccagtggatatgtgggcatgtggtgtcattctctatattctacttgtggggtatccacccttctgggatgaagaccaacacagactctatcagcagatcaaggctggagcttatgattttccatcaccagaatgggacacggtgactcctgaagccaaagacctcatcaataaaatgcttactatcaaccctgccaaacgcatcacagcctcagaggcactgaagcacccatggatctgtcaacgttctactgttgcttccatgatgcacagacaggagactgtagactgcttgaagaaatttaatgctagaagaaaactaaagggtgccatcttgacaactatgctggctacaaggaatttctcagcagccaagagtttgttgaagaaaccagatggagtaaagataaacaacaaagccaacgtggtaaccagccccaaagaaaatattcctaccccagcgctggagccccaaactactgtaatccacaaccctgatggaaacaaggagtcaactgagagttcaaatacaacaattgaggatgaagatgtgaaagcacgaaagcaagagattatcaaagtcactgaacaactgatcgaagctatcaacaatggggactttgaagcctacacaaaaatctgtgacccaggccttactgcttttgaacctgaagctttgggtaatttagtggaagggatggattttcaccgattctactttgaaaatgctttgtccaaaagcaataaaccaatccacactattattctaaaccctcatgtacatctggtaggggatgatgccgcctgcatagcatatattaggctcacacagtacatggatggcagtggaatgccaaagacaatgcagtcagaagagactcgtgtgtggcaccgccgggatggaaagtggcagaatgttcattttcatcgctcggggtcaccaacagtacccatcaagccaccctgtattccaaatgggaaagaaaacttctcaggaggcacctctttgtggcaaaacatctaaggcctgaaaaccattcacatatgggtcttctaaatttcaacagtgccacttctgcattctctgttctcaaggcacctggatggtgaccctgggccgtcctctcctcctcttcatgcatgtttctgagtgcatgaagttgtgaaggtcctacatgtaatgcatatgtgatgcatcatcttatcatatattccttcctatacattgtttacacttcaactacggggatgttccacacaaacttaaattactgttggcaaaacaatagggggagattagacaaaaaaaaaaatccacaatattccaagtacaactcttcatcaagtttctctgttaatgccaagatttaacagacttaagaactattgttctctgaatgacagttgtaagagaaatgtaaattttttagaactctttgctgttaatctgttttggtttgtttggtttttttttttttttttaaggtaaaaaaaaaatacaccttcagtttcctggtgtgatcctggttaaaatggatgatttttcattgaaagttttgctgattaacaattaaagtgggatgatatgtgggcaaaatcacttatgaaagtagaagcaagaatcagttggtttgctaccacataaagccatgctgtttttggtcaaactgtgtaaactggaaaaattcacatcatttctgagtttaatcactttaggatatattcacattgttttggtgaatttgctgaattgaattgtttttctttctcaaatctgtgatctcttttctttatcctgtttctttgttcctttcgtttgctttcttatttttcttttgttccattcttttcttacttttttcccttttccttttttggggaggctggctagtagtgtgtgagaaaagaatagaagtgaaatttgcataatgaatgtaaaagggaaataaaagtcttttgaaggtagctatactagcacttttgatcatcttcagggcccacaaaaatgttgtcaagattttaaaggtttataattctgcttaagctctagtttggacttaggtatcctaactatgttggaggtatttgcattgtttaaagttaggataaaagcaagttcctcctgtgactgcaacgtcttactgattgggacagttgccaggaggataccaacttgatagcagagggggttttatgcaaacgcactcacctccgccttggggaatgaaagggtcacttctgcatcatcactagctagttttctagtgttagagaggcttacaaatgtttgccattctcataagtgttttgaacttgatctttgtgacttgtgcttttttagcttctctcttgaatcagagtatcattgtcttcctccaaggagttagaatttcccagtttaaaacaaaaagggaaatgtcctaggttttctttgtgcttctcatttttcctttgttgattcaattcctgtgatttttgttctcttccctgaagtgctttacagtgcatggaatctccatcattgttattttaacgatagtaattcacagtcctcagaagcctatttttaaagcagaagcaaaaaagaaaaacaaaataacaaaaacaacccttcctcttttctctcatctcacctctctgtgttgattactaatcatcttagatattattgctagtggatgtatggtagatgggttgaagcttttctgataattattacacaatttaaaacaacatatatatttaaaataaatatatacagtaaatatattgagccatgttaacctgccaatgagatctgtgaaaaaataatggcctcatttttctctttttaatttcttttacccttttgtgaagcagctatacgtggcatacatgtatttaaagaaaaaaaaatagatgtagagtgttttttttacacttttaacttagcatgtggtgttgaagtattactgtagatcaagtttgtcttccgcactaagatgtgaggaaattgtgatttgttctctccaccacaaatgaattacacatttattatcttctatcattttgaaacactgcagtttaccatgggacactgtatatatttcttgccataatggtaaaggactgattgatatatttaagagttaataaatttgtgatttctgctgacagtgcgtccatctttatttcttcagaagaggtactgtatgtatgcctgcatagtgctggccagtgtcaagggcagtgtgtcctactctggtctcatttagtacataacaatttgcacttggtgagaatggcaagttaattgttctctgtgagcaaaacaatggtctcttctgggaaaatgttgctgagaacaatatagttaacaactaagactcctaaaagcttctctaaactgtaccctccaatccagccttcacatggctgctttttttttttttttttaatacgaacctgtccttgtaacactttgatgttatcatttctgggatacaggcaagcaccccagctcctgctactccccagcttgaacttgagcatacatggatgctcagcttcttttgatttgctaaaaacatcacacttgctcacatgcctgtttatgctgttcatgttgtttatgtttcttacctagaataaatagtctcttcccctacttcttttcccgacttcttactttttcctaagattcagtgtacagcatcatgctccacagcaaaccttcctaggccctattctgggcttgccttccctctcaaaacctacataatagattgtatttacctctcctgtcaaccacattgttttgaaaatatatttctatttgtgtctcctctactgcagtataatgtctccatgggcaagaactgtgtattcatcattgcattcctaaacccaaaccaaggccaggaatggagatatcattgataaatagttgttgaattgaggccaagcccttttgataacagaagcctcaaggggtacccagatagtccttgttttaatgatgggttctctcaccactgtcttgatgctctgagcaagttacctcttccctctgaccctcagtttccatatttgtaaaatgagaataaacataccaacttaataaagatattgtgaggattaatgggtacagagtgactagaatgatatttgatagaaattaaatggtagcagtataactattctgatcactgacattaatattcctattgttattattctttgctcacgagggtatacaactcttgttttgctgttgggctgccctctttatgtaggtttactgttaatgctgaggatatactcggactcaaatgtctcagcagaaggctgagagacaccaaatgaagtggtcatctagctgaatgtaggaaaaatgaaatgtagtagcaaatcagtatattctaaggaaattttcaaggaatattaatcttcacccaaattttgaatttttatgtaaaaaattataatttaagggtaaacatagatgacacagctttcgagtgatttcattgaataaaattctactgacttctatgaa

SEQ ID NO: 358 - RNA, 5785 nt, Homo sapiens
  source 1..5785: mol_type = mRNA
ttcatagaagtcagtagaattttattcaatgaaatcactcgaaagctgtgtcatctatgtttacccttaaattataattttttacataaaaattcaaaatttgggtgaagattaatattccttgaaaatttccttagaatatactgatttgctactacatttcatttttcctacattcagctagatgaccacttcatttggtgtctctcagccttctgctgagacatttgagtccgagtatatcctcagcattaacagtaaacctacataaagagggcagcccaacagcaaaacaagagttgtataccctcgtgagcaaagaataataacaataggaatattaatgtcagtgatcagaatagttatactgctaccatttaatttctatcaaatatcattctagtcactctgtacccattaatcctcacaatatctttattaagttggtatgtttattctcattttacaaatatggaaactgagggtcagagggaagaggtaacttgctcagagcatcaagacagtggtgagagaacccatcattaaaacaaggactatctgggtaccccttgaggcttctgttatcaaaagggcttggcctcaattcaacaactatttatcaatgatatctccattcctggccttggtttgggtttaggaatgcaatgatgaatacacagttcttgcccatggagacattatactgcagtagaggagacacaaatagaaatatattttcaaaacaatgtggttgacaggagaggtaaatacaatctattatgtaggttttgagagggaaggcaagcccagaatagggcctaggaaggtttgctgtggagcatgatgctgtacactgaatcttaggaaaaagtaagaagtcgggaaaagaagtaggggaagagactatttattctaggtaagaaacataaacaacatgaacagcataaacaggcatgtgagcaagtgtgatgtttttagcaaatcaaaagaagctgagcatccatgtatgctcaagttcaagctggggagtagcaggagctggggtgcttgcctgtatcccagaaatgataacatcaaagtgttacaaggacaggttcgtattaaaaaaaaaaaaaaaaagcagccatgtgaaggctggattggagggtacagtttagagaagcttttaggagtcttagttgttaactatattgttctcagcaacattttcccagaagagaccattgttttgctcacagagaacaattaacttgccattctcaccaagtgcaaattgttatgtactaaatgagaccagagtaggacacactgcccttgacactggccagcactatgcaggcatacatacagtacctcttctgaagaaataaagatggacgcactgtcagcagaaatcacaaatttattaactcttaaatatatcaatcagtcctttaccattatggcaagaaatatatacagtgtcccatggtaaactgcagtgtttcaaaatgatagaagataataaatgtgtaattcatttgtggtggagagaacaaatcacaatttcctcacatcttagtgcggaagacaaacttgatctacagtaatacttcaacaccacatgctaagttaaaagtgtaaaaaaaacactctacatctatttttttttctttaaatacatgtatgccacgtatagctgcttcacaaaagggtaaaagaaattaaaaagagaaaaatgaggccattattttttcacagatctcattggcaggttaacatggctcaatatatttactgtatatatttattttaaatatatatgttgttttaaattgtgtaataattatcagaaaagcttcaacccatctaccatacatccactagcaataatatctaagatgattagtaatcaacacagagaggtgagatgagagaaaagaggaagggttgtttttgttattttgtttttcttttttgcttctgctttaaaaataggcttctgaggactgtgaattactatcgttaaaataacaatgatggagattccatgcactgtaaagcacttcagggaagagaacaaaaatcacaggaattgaatcaacaaaggaaaaatgagaagcacaaagaaaacctaggacatttccctttttgttttaaactgggaaattctaactccttggaggaagacaatgatactctgattcaagagagaagctaaaaaagcacaagtcacaaagatcaagttcaaaacacttatgagaatggcaaacatttgtaagcctctctaacactagaaaactagctagtgatgatgcagaagtgaccctttcattccccaaggcggaggtgagtgcgtttgcataaaaccccctctgctatcaagttggtatcctcctggcaactgtcccaatcagtaagacgttgcagtcacaggaggaacttgcttttatcctaactttaaacaatgcaaatacctccaacatagttaggatacctaagtccaaactagagcttaagcagaattataaacctttaaaatcttgacaacatttttgtgggccctgaagatgatcaaaagtgctagtatagctaccttcaaaagacttttatttcccttttacattcattatgcaaatttcacttctattcttttctcacacactactagccagcctccccaaaaaaggaaaagggaaaaaagtaagaaaagaatggaacaaaagaaaaataagaaagcaaacgaaaggaacaaagaaacaggataaagaaaagagatcacagatttgagaaagaaaaacaattcaattcagcaaattcaccaaaacaatgtgaatatatcctaaagtgattaaactcagaaatgatgtgaatttttccagtttacacagtttgaccaaaaacagcatggctttatgtggtagcaaaccaactgattcttgcttctactttcataagtgattttgcccacatatcatcccactttaattgttaatcagcaaaactttcaatgaaaaatcatccattttaaccaggatcacaccaggaaactgaaggtgtattttttttttaccttaaaaaaaaaaaaaaaaaccaaacaaaccaaaacagattaacagcaaagagttctaaaaaatttacatttctcttacaactgtcattcagagaacaatagttcttaagtctgttaaatcttggcattaacagagaaacttgatgaagagttgtacttggaatattgtggatttttttttttgtctaatctccccctattgttttgccaacagtaatttaagtttgtgtggaacatccccgtagttgaagtgtaaacaatgtataggaaggaatatatgataagatgatgcatcacatatgcattacatgtaggaccttcacaacttcatgcactcagaaacatgcatgaagaggaggagaggacggcccagggtcaccatccaggtgccttgagaacagagaatgcagaagtggcactgttgaaatttagaagacccatatgtgaatggttttcaggccttagatgttttgccacaaagaggtgcctcctgagaagttttctttcccatttggaatacagggtggcttgatgggtactgttggtgaccccgagcgatgaaaatgaacattctgccactttccatcccggcggtgccacacacgagtctcttctgactgcattgtctttggcattccactgccatccatgtactgtgtgagcctaatatatgctatgcaggcggcatcatcccctaccagatgtacatgagggtttagaataatagtgtggattggtttattgcttttggacaaagcattttcaaagtagaatcggtgaaaatccatcccttccactaaattacccaaagcttcaggttcaaaagcagtaaggcctgggtcacagatttttgtgtaggcttcaaagtccccattgttgatagcttcgatcagttgttcagtgactttgataatctcttgctttcgtgctttcacatcttcatcctcaattgttgtatttgaactctcagttgactccttgtttccatcagggttgtggattacagtagtttggggctccagcgctggggtaggaatattttctttggggctggttaccacgttggctttgttgtttatctttactccatctggtttcttcaacaaactcttggctgctgagaaattccttgtagccagcatagttgtcaagatggcaccctttagttttcttctagcattaaatttcttcaagcagtctacagtctcctgtctgtgcatcatggaagcaacagtagaacgttgacagatccatgggtgcttcagtgcctctgaggctgtgatgcgtttggcagggttgatagtaagcattttattgatgaggtctttggcttcaggagtcaccgtgtcccattctggtgatggaaaatcataagctccagccttgatctgctgatagagtctgtgttggtcttcatcccagaagggtggataccccacaagtagaatatagagaatgacaccacatgcccacatatccactggctttccataaggatctttacgtaaaacttctggagaaagatatccaggtgtgccagcaaaaccaaaccacgcctgctggtccccttgaacttctatggctaagccaaagtctgccaatttcacagctgctcccttggatttgctagctaaaagcaaattctcaggcttcaggtcccgatggaccacgcccatctgatggcagtgtagcacagcctccaggatctgctgaatgcaatgactggcatcagcttcactgtagtattctcttgccactatgtcttcaaacagttcacctccagtaactaaatcaaacaccaagtagtgaaagccctcttctgatatgctatcatgaagtcgcacaatattagggtgcttcaaaagacggcagattctagcttctctttctagtttctgatgatccctagcagaaagctttttggtgttgataattttggcagcatattcttgtccagtaggaattttcatacatcttctcaccactgagaatgccccctttccaagctcctcgaaaagctgatactcgtccgtgaacctggtgcaggttgtggtcgaagccatcctcggtccgggctgtgccctggctgggagcgcgacggaccagaagcgagcagacgcgcggctaaccccgggactggccccgcggcgctgtcacccagggccgctcttactttcctggtccgaaagtagctcgcccgcgagggagtgtgcgcaggggcggggcgggaggggagatgaccagaaagggtggcgtggggtctcctccccacagtccgccgatcctcctcctcctgcgggcctcgcttccttcttctccactggacgctccacccgccccttttccagtccctgtccccaaatgcagggggtaaagtactcaagaagagggggccgggaaatggaaaaacagccaggcacgggacgagtggcaagcagttgcgaaacgatccgcactggagcaggaggagtagaagcagaggggagggagtccgagggggcggaggtggagtgcagcggggccgaggccgcggagcccagagcggacagcctgagcccagcggccgctgtcagcaggctcaggcgcggggcgcgccggggctccgacgagcgtgcgcgcccgaggccggcttccctccggcgggcggcagcggctccggcgaagcgaggcaccttggcggcctcgcgctgctcacgagcccgcgcggcttcaagacggcgcggcgagagaaag

SEQ ID NO: 359 - RNA, 5615 nt, Mus musculus
  source 1..5615: mol_type = mRNA
ggaggcgccggggaggagccgcggctgccagcttcgcccgagccgagcgagcgcactctgtcgccccgcgggttcccagccttgcggccccgtggagaggagggagcgcgggccaccagcgcctcctctgcccgctggaacgaccggctgggtgttcactcggccgctgccgcccgccactccgggcgctgcgttgagctctccgtgcggcctcggtgaccgcggcaacccctcctgacacctctcccccgccccttcgggagccctcggcccggccaccgcggcgggaggaggagaggacaagggatcgcggagcgggctggtctggccacctcgccccgcgcgccccgcccctgcgcgcactccctcgccggcgagctactttcggacacggaaagtgagggcggccccgggtgacagcgcggcggcgccagtcccgggaagccaggtctgttcgcgtgtcgcccgtcgcactgtccagaccccgccatggcttcgaccaccacctgcacccggttcaccgacgagtatcagctctttgaggagctcggaaagggggcgttctcagtggtgagaagatgtatgaaaatccctactggacaagagtatgctgccaaaattatcaacaccaaaaagctttctgctagggaccatcagaaactggaaagggaagctagaatctgccgtctcttgaagcaccccaatattgtgagacttcacgacagtatatcggaggagggcttccattacttggtgtttgacttagtgactggtggcgaactgtttgaagacatagtggcaagagaatattacagtgaagctgatgccagtcattgcattcagcagatcctggaggctgtgctacactgccatcagatgggcgtagtccatcgggacctaaagcctgagaatttgcttttagctagcaagtccaaaggagcagctgtgaagctggcagacttcggcttagccatagaagttcaaggcgaccagcaggcatggtttggttttgctggcacacctgggtatctttctccagaagtcctgcgtaaagatccttatggaaaaccagtggatatgtgggcatgcggtgtcatcctctacatcttgctggtgggatacccacccttctgggatgaagatcagcatagactgtatcagcagatcaaggccggagcttacgattttccgtcaccagaatgggatacagtgacacctgaagccaaagacctcatcaacaaaatgctgaccatcaaccctgccaaacgtatcacagcctctgaggccctgaaacacccatggatctgtcaacgctctactgttgcctccatgatgcacaggcaggagactgtagactgcttgaagaaatttaatgctagacggaaactgaagggcgccatcttgacaactatgctggctacgagaaatttttcagcagccaagagtttattgaagaaaccagatggggtaaagataaacaacaaagccaacgtggtaaccagccccaaagaaaatattcctaccccggcgctggagccccaaactactgtaatccacaaccctgacggaaacaaggagtcaactgagagctcaaacaccaccattgaggatgaagacgtgaaagcacgaaaacaggagatcatcaaagtcactgagcaactgattgaagctatcaacaatggggactttgaggcttacacaaaaatctgtgatccaggcctcactgcctttgaacctgaagcattgggcaacttagtggaagggatggactttcacagattctactttgaaaatgctttgtccaaaagcaataaaccaatccacacgatcatcctcaacccacacgttcacctggtaggggatgacgcagcctgcatcgcatacattcggctcacacagtacatggacggaagcgggatgccaaagaccatgcagtcagaagagacgcgcgtgtggcaccgccgtgatgggaagtggcagaatgttcactttcaccgttcggggtcccccacagtacccatcaactaattgtcaacagtgccacttcttcattctgtcctcaaggcaccaggcgggtgatcctgggacgtcctctcctcttcatgcatgtttctgagtgcatgaagttgtgaaggttctacgtgtaatgcatatgtgacacgtcatcttatcatgtgacacgtcatcttatcatgtattccttcctgtacattgtttacactccagctaccggacgggatgttccatgcaaacttccgttactgttggcaaactctagagggagctcagacaagaaaattccacaataactccaagttcagctgatccgtcaggtttctctgtgtatgccaagatccaaaagacttaattaaaattactgttctctgaatgacagtgtgtaaggaaatctttcaagaatgctgtcattattctctttgagctttttgttgggatttggggttttgggtttttttaggtttttttttttcttcacttttaaggcaaatacatatatgtatatgccttcagttcctggtgtgctcctgatagaaatgaatggatggcttttctctgacagtgttggtgttagataaatggatggttatgtaagcaaactcctgtgtgatcgtaggagcaagaatcatttggtgattctaccatcaaagccatgttgatttgggtcaaactatgtatactggaaaaattcacatcgtttactagtttgattgctttcagacacacacagtcctggtgaatgcttggcactgatttgggtttttctttcttaagtctgtgttgtgttttcagtgtatactatttgctccatttctttgtatttgtttttatttttcttttctttatctttctctctccccctttctctctctctttcttttgtgtatttatctttctttcttcctatagctggtagtatgtaaaaagaaaaaaaagtaacatttgtatatgattaaaataaaagtcaaggtcttttagaggaagctaaaactaacacttccaggctcttcagggctgtggagttgttacatttaaataaatatttaaataaaagaagaataaaattcagcttaagctaccatttgtgcgtaggtatccttgctatgtggaaattgttggaattgttgagacttacgctaatagcagtaaaagcctactatactgacctggttcgtcccaactacagaaatggaagaccaaatggagtacaacctgtgtacaacctgggtcagaggacatttcctgcctcactttcactagctagccacgtgaggagtaatctccatcttcctagaggttgaacttgatctttgtgattcctgcagttctagcttctctcttgagtcacagtagtatccttctgccgggagttaaggcttgtctagcttaaaacaaagaggaaaaggaaatgccccagttttcttctcgtctctcgtttctcctttgtcgattcggtccctgggaggctgtttctctgcgctgaactgctttatggtgcatggaatatccatcagcgttacctccaccatagctgctcacactccttagaagccgatttttaaagcagaagcaaaaaaagcaaaaacttaaacacccccttctctttttcctcatttcaccttttggtgttgattgctaatcactttagatatattgttgctagtgaatgtatgatagatggttgaagcttttctgataattatcacatgatttaaaacaatatatatttaaaacgaatatatacagtaaatgtattgagccgtgtaacctgccaatgagatctgtgaaaaagtaatggcctcacttttcccttttggatttcttttacctttctgtgaagcagctctgcgtggcatacatgtatttaaaaacacaaatagtggtaggatggtttggtttttttgtttttttgtttttttttttttacacttttaacttagcatgtggtgttgaagaattaccatagatccagtttgtcttctgcactaagatgtgaggaaatcgtgatttgttctctccagcacagtgaaattacaccttcatcatcttctattgtttggaaaacactgcagtttaccatgggacactgtatatatttcttgccgtaatggtaaatgactgattgatatatttaagagttaataaatttgtgatttctgctgacaatgtgtccatttttatttcttaagaaatactctatgtgtggtgccggccactgccaaggacatgatgtcctgccctggtctccttcaataaacaacttgcagtctgtgatcatggcaagctgtttgttctcgctgcacgcagtggagctgtctgtcgttccacagaaaacttagctgaaaggaaaattagcggctgagtatcctaaaagcttgtagatgcacacgcttctgtccatctctttagcaggactgctaaaatgtccctctactaacacagagctgtcagtcatctccagtacatagcagtcaccctagatgctatgacctcacaattacagattgctaatgtgctattagttaaagcactacctgttctttatgtccactcatgtgactcactttcttacctagaacagtcttcctttgttggattatcccattctttaactcattcactgaaatccagagtagtgttgtgcctcctctagtgaatttccttggcagctcctaggcttgtttgctctgtcatgagttgcgtggtagtctgcattcactattcctgctgctatccacattattctgacagtatatatattttttgcattatctttactgtagtaggaaagtctgtagagatgagaactatgcattcacgactatacccctacaatgaaaccagagcgagaaaaggaggggctgtaaataaaccattgttgaactgagaccatactgtacaaagcaacctctaagtgagatcaggcagtcctgggttgaatgctgggctctttcatcattatcctgatgttctaaacaagctgcttcttaccttggaacttcagtttccttaaaatgagtgtaagtatataaattaaattataatatcttaaggattagaaataacaggcataaaatccctagaataccttttttgtatattaaatgagcgttattgggcatgctggtatatggctatgatctcagcaagctagtatgggctacatagaagaccccacctcaacaaaatgtataaatgaacccatgatactcacagaaccctcttgctatcattccctgtttcagatcaggagggtgtgcaacccttgctttaccatggggagctctcttaagttaagcttactgttattgcaaaggatgtacttgcattccagtgcctcagcaagaagatgagagccacaaagggaggtagccatggccctgaaaatacaaaaggagatggagttaactggtacattttggggaaaatttcaaaaatgtcaattttaagtagctaaaattttgaatttctatgtaaaagaattctatataatgtgaagataaatgtagaaaacaactttcattaaatatttgttttagtcatttcattaaataaaatcctactgactttgagactaaaaaaaaaaaaaaaaaaaaaaa

SEQ ID NO: 360 - RNA, 5615 nt, Mus musculus
  source 1..5615: mol_type = mRNA
tttttttttttttttttttttttagtctcaaagtcagtaggattttatttaatgaaatgactaaaacaaatatttaatgaaagttgttttctacatttatcttcacattatatagaattcttttacatagaaattcaaaattttagctacttaaaattgacatttttgaaattttccccaaaatgtaccagttaactccatctccttttgtattttcagggccatggctacctccctttgtggctctcatcttcttgctgaggcactggaatgcaagtacatcctttgcaataacagtaagcttaacttaagagagctccccatggtaaagcaagggttgcacaccctcctgatctgaaacagggaatgatagcaagagggttctgtgagtatcatgggttcatttatacattttgttgaggtggggtcttctatgtagcccatactagcttgctgagatcatagccatataccagcatgcccaataacgctcatttaatatacaaaaaaggtattctagggattttatgcctgttatttctaatccttaagatattataatttaatttatatacttacactcattttaaggaaactgaagttccaaggtaagaagcagcttgtttagaacatcaggataatgatgaaagagcccagcattcaacccaggactgcctgatctcacttagaggttgctttgtacagtatggtctcagttcaacaatggtttatttacagcccctccttttctcgctctggtttcattgtaggggtatagtcgtgaatgcatagttctcatctctacagactttcctactacagtaaagataatgcaaaaaatatatatactgtcagaataatgtggatagcagcaggaatagtgaatgcagactaccacgcaactcatgacagagcaaacaagcctaggagctgccaaggaaattcactagaggaggcacaacactactctggatttcagtgaatgagttaaagaatgggataatccaacaaaggaagactgttctaggtaagaaagtgagtcacatgagtggacataaagaacaggtagtgctttaactaatagcacattagcaatctgtaattgtgaggtcatagcatctagggtgactgctatgtactggagatgactgacagctctgtgttagtagagggacattttagcagtcctgctaaagagatggacagaagcgtgtgcatctacaagcttttaggatactcagccgctaattttcctttcagctaagttttctgtggaacgacagacagctccactgcgtgcagcgagaacaaacagcttgccatgatcacagactgcaagttgtttattgaaggagaccagggcaggacatcatgtccttggcagtggccggcaccacacatagagtatttcttaagaaataaaaatggacacattgtcagcagaaatcacaaatttattaactcttaaatatatcaatcagtcatttaccattacggcaagaaatatatacagtgtcccatggtaaactgcagtgttttccaaacaatagaagatgatgaaggtgtaatttcactgtgctggagagaacaaatcacgatttcctcacatcttagtgcagaagacaaactggatctatggtaattcttcaacaccacatgctaagttaaaagtgtaaaaaaaaaaaaacaaaaaaacaaaaaaaccaaaccatcctaccactatttgtgtttttaaatacatgtatgccacgcagagctgcttcacagaaaggtaaaagaaatccaaaagggaaaagtgaggccattactttttcacagatctcattggcaggttacacggctcaatacatttactgtatatattcgttttaaatatatattgttttaaatcatgtgataattatcagaaaagcttcaaccatctatcatacattcactagcaacaatatatctaaagtgattagcaatcaacaccaaaaggtgaaatgaggaaaaagagaagggggtgtttaagtttttgctttttttgcttctgctttaaaaatcggcttctaaggagtgtgagcagctatggtggaggtaacgctgatggatattccatgcaccataaagcagttcagcgcagagaaacagcctcccagggaccgaatcgacaaaggagaaacgagagacgagaagaaaactggggcatttccttttcctctttgttttaagctagacaagccttaactcccggcagaaggatactactgtgactcaagagagaagctagaactgcaggaatcacaaagatcaagttcaacctctaggaagatggagattactcctcacgtggctagctagtgaaagtgaggcaggaaatgtcctctgacccaggttgtacacaggttgtactccatttggtcttccatttctgtagttgggacgaaccaggtcagtatagtaggcttttactgctattagcgtaagtctcaacaattccaacaatttccacatagcaaggatacctacgcacaaatggtagcttaagctgaattttattcttcttttatttaaatatttatttaaatgtaacaactccacagccctgaagagcctggaagtgttagttttagcttcctctaaaagaccttgacttttattttaatcatatacaaatgttacttttttttctttttacatactaccagctataggaagaaagaaagataaatacacaaaagaaagagagagagaaagggggagagagaaagataaagaaaagaaaaataaaaacaaatacaaagaaatggagcaaatagtatacactgaaaacacaacacagacttaagaaagaaaaacccaaatcagtgccaagcattcaccaggactgtgtgtgtctgaaagcaatcaaactagtaaacgatgtgaatttttccagtatacatagtttgacccaaatcaacatggctttgatggtagaatcaccaaatgattcttgctcctacgatcacacaggagtttgcttacataaccatccatttatctaacaccaacactgtcagagaaaagccatccattcatttctatcaggagcacaccaggaactgaaggcatatacatatatgtatttgccttaaaagtgaagaaaaaaaaaaacctaaaaaaacccaaaaccccaaatcccaacaaaaagctcaaagagaataatgacagcattcttgaaagatttccttacacactgtcattcagagaacagtaattttaattaagtcttttggatcttggcatacacagagaaacctgacggatcagctgaacttggagttattgtggaattttcttgtctgagctccctctagagtttgccaacagtaacggaagtttgcatggaacatcccgtccggtagctggagtgtaaacaatgtacaggaaggaatacatgataagatgacgtgtcacatgataagatgacgtgtcacatatgcattacacgtagaaccttcacaacttcatgcactcagaaacatgcatgaagaggagaggacgtcccaggatcacccgcctggtgccttgaggacagaatgaagaagtggcactgttgacaattagttgatgggtactgtgggggaccccgaacggtgaaagtgaacattctgccacttcccatcacggcggtgccacacgcgcgtctcttctgactgcatggtctttggcatcccgcttccgtccatgtactgtgtgagccgaatgtatgcgatgcaggctgcgtcatcccctaccaggtgaacgtgtgggttgaggatgatcgtgtggattggtttattgcttttggacaaagcattttcaaagtagaatctgtgaaagtccatcccttccactaagttgcccaatgcttcaggttcaaaggcagtgaggcctggatcacagatttttgtgtaagcctcaaagtccccattgttgatagcttcaatcagttgctcagtgactttgatgatctcctgttttcgtgctttcacgtcttcatcctcaatggtggtgtttgagctctcagttgactccttgtttccgtcagggttgtggattacagtagtttggggctccagcgccggggtaggaatattttctttggggctggttaccacgttggctttgttgtttatctttaccccatctggtttcttcaataaactcttggctgctgaaaaatttctcgtagccagcatagttgtcaagatggcgcccttcagtttccgtctagcattaaatttcttcaagcagtctacagtctcctgcctgtgcatcatggaggcaacagtagagcgttgacagatccatgggtgtttcagggcctcagaggctgtgatacgtttggcagggttgatggtcagcattttgttgatgaggtctttggcttcaggtgtcactgtatcccattctggtgacggaaaatcgtaagctccggccttgatctgctgatacagtctatgctgatcttcatcccagaagggtgggtatcccaccagcaagatgtagaggatgacaccgcatgcccacatatccactggttttccataaggatctttacgcaggacttctggagaaagatacccaggtgtgccagcaaaaccaaaccatgcctgctggtcgccttgaacttctatggctaagccgaagtctgccagcttcacagctgctcctttggacttgctagctaaaagcaaattctcaggctttaggtcccgatggactacgcccatctgatggcagtgtagcacagcctccaggatctgctgaatgcaatgactggcatcagcttcactgtaatattctcttgccactatgtcttcaaacagttcgccaccagtcactaagtcaaacaccaagtaatggaagccctcctccgatatactgtcgtgaagtctcacaatattggggtgcttcaagagacggcagattctagcttccctttccagtttctgatggtccctagcagaaagctttttggtgttgataattttggcagcatactcttgtccagtagggattttcatacatcttctcaccactgagaacgccccctttccgagctcctcaaagagctgatactcgtcggtgaaccgggtgcaggtggtggtcgaagccatggcggggtctggacagtgcgacgggcgacacgcgaacagacctggcttcccgggactggcgccgccgcgctgtcacccggggccgccctcactttccgtgtccgaaagtagctcgccggcgagggagtgcgcgcaggggcggggcgcgcggggcgaggtggccagaccagcccgctccgcgatcccttgtcctctcctcctcccgccgcggtggccgggccgagggctcccgaaggggcgggggagaggtgtcaggaggggttgccgcggtcaccgaggccgcacggagagctcaacgcagcgcccggagtggcgggcggcagcggccgagtgaacacccagccggtcgttccagcgggcagaggaggcgctggtggcccgcgctccctcctctccacggggccgcaaggctgggaacccgcggggcgacagagtgcgctcgctcggctcgggcgaagctggcagccgcggctcctccccggcgcctcc

SEQ ID NO: 361 - RNA, 2301 nt, Rattus norvegicus
  source 1..2301: mol_type = mRNA
ttcgggagcgctcgcccggcgggaggaggaggaagaaggatcgcggctcgggctggtctggccacctcgccccgcgcgccccgcccctgcgcgcactccctcgccggcgagctactttcggacaaggaaagtgagggcggccccgggtgacagcgcggcggtgccagtcccgggaagccgcgtctgttcgcgtgtcgcccgtcgcactgtccagaccccgccatggcttcgaccaccacctgcacccggttcaccgacgagtatcagctcttcgaggagctcggaaagggggcattctcagtggtgagaagatgcatgaaaatccctactggacaagagtatgctgccaaaattatcaacaccaaaaagctttctgctagggatcatcagaaactggaaagggaagctagaatctgccgtctcttgaagcaccccaatattgtgagacttcatgacagcatatccgaagagggcttccattacttggtgtttgacttagttactggtggcgaactctttgaagacatagtggcaagagaatattacagtgaggctgatgccagtcattgtatacaacagattctagagagtgtaaatcattgtcacctaaatggcatagttcacagggacctgaagcctgagaatttgcttttagctagcaaatccaaaggagcagctgtgaaactggcagacttcggcttagccatagaagttcaaggcgaccagcaggcgtggtttggttttgctggcacacctgggtatctttctccagaagtcctacgtaaagatccttatggaaaaccagtggacatgtgggcatgtggcgtcatcctctacatcttgctggtgggatacccacccttctgggatgaagatcagcatagactgtatcagcagatcaaggctggagcgtacgattttccatcaccagaatgggacacagtgacacctgaagccaaagacctcatcaacaaaatgctgaccatcaaccctgccaaacgcatcacagcctctgaggccctgaaacacccatggatctgtcaacgttctactgttgcctccatgatgcacaggcaggagactgtagactgcttgaagaaatttaatgctcgacggaaattgaagggtgccatcttgacaactatgctggctacgagaaatttttcagcagccaagagtttgttgaagaaaccggatggggtaaagataaacaacaaagccaacgtggtaaccagccccaaagaaaatattcctaccccggcgctggagccccaaactactgtaatccacaaccctgatggaaacaaggagtcaactgagagctcaaataccaccattgaggatgaagacgtgaaagcacgaaagcaagagatcatcaaagtcactgagcagctgattgaagctatcaacaatggggacttcgaggcttacacgaaaatctgtgatccaggcctcactgcctttgaacccgaagcattgggcaacttagtggaagggatggactttcacagattctactttgaaaatgctttgcccaaaatcaataaaccaatccacactatcatcctgaaccctcacgtacacctggtaggggatgatgcagcctgcatagcatacattcggctcacacagtacatggatggaaatggaatgccaaagacaatgcagtcagaagagactcgagtgtggcaccgccgtgatgggaagtggcagaatattcactttcatcgttcggggtccccaacagtccccatcaagccaccctgtattccaaatgggaaagaaaacttctcaggaggcacctctttgtggcaaaacatctgaaaaccattcacatttgggtcttctaattgtcaacagtgccacgtcttcattctgtcctcaaggcacctggcggggtgatcctgggacatcctctcctcttcatgcatgtttctgagtgcatgaagttgtgaaggttctacgtgtaatgcatatgtgacacgtcatcttaccatgtgacacgccatcttaccatgtattccttcctgtacattgtttacactccagctactggacggatgttccatgcaaacgtcagttactgctggcaaactaaagagggagctccgacaagaaaactccgcaatactccaagttcagctgatccatcaggtttctctgtggatgccaagattcaaaagacttcataaaattactgttcaatgaatgacagtgtgtaagaggaaaggaaatctttcaagaatgctgccattaatctatttgggcttctcattgggattttggggttgattttttttt

SEQ ID NO: 362 - RNA, 2301 nt, Rattus norvegicus
  source 1..2301: mol_type = mRNA
aaaaaaaaatcaaccccaaaatcccaatgagaagcccaaatagattaatggcagcattcttgaaagatttcctttcctcttacacactgtcattcattgaacagtaattttatgaagtcttttgaatcttggcatccacagagaaacctgatggatcagctgaacttggagtattgcggagttttcttgtcggagctccctctttagtttgccagcagtaactgacgtttgcatggaacatccgtccagtagctggagtgtaaacaatgtacaggaaggaatacatggtaagatggcgtgtcacatggtaagatgacgtgtcacatatgcattacacgtagaaccttcacaacttcatgcactcagaaacatgcatgaagaggagaggatgtcccaggatcaccccgccaggtgccttgaggacagaatgaagacgtggcactgttgacaattagaagacccaaatgtgaatggttttcagatgttttgccacaaagaggtgcctcctgagaagttttctttcccatttggaatacagggtggcttgatggggactgttggggaccccgaacgatgaaagtgaatattctgccacttcccatcacggcggtgccacactcgagtctcttctgactgcattgtctttggcattccatttccatccatgtactgtgtgagccgaatgtatgctatgcaggctgcatcatcccctaccaggtgtacgtgagggttcaggatgatagtgtggattggtttattgattttgggcaaagcattttcaaagtagaatctgtgaaagtccatcccttccactaagttgcccaatgcttcgggttcaaaggcagtgaggcctggatcacagattttcgtgtaagcctcgaagtccccattgttgatagcttcaatcagctgctcagtgactttgatgatctcttgctttcgtgctttcacgtcttcatcctcaatggtggtatttgagctctcagttgactccttgtttccatcagggttgtggattacagtagtttggggctccagcgccggggtaggaatattttctttggggctggttaccacgttggctttgttgtttatctttaccccatccggtttcttcaacaaactcttggctgctgaaaaatttctcgtagccagcatagttgtcaagatggcacccttcaatttccgtcgagcattaaatttcttcaagcagtctacagtctcctgcctgtgcatcatggaggcaacagtagaacgttgacagatccatgggtgtttcagggcctcagaggctgtgatgcgtttggcagggttgatggtcagcattttgttgatgaggtctttggcttcaggtgtcactgtgtcccattctggtgatggaaaatcgtacgctccagccttgatctgctgatacagtctatgctgatcttcatcccagaagggtgggtatcccaccagcaagatgtagaggatgacgccacatgcccacatgtccactggttttccataaggatctttacgtaggacttctggagaaagatacccaggtgtgccagcaaaaccaaaccacgcctgctggtcgccttgaacttctatggctaagccgaagtctgccagtttcacagctgctcctttggatttgctagctaaaagcaaattctcaggcttcaggtccctgtgaactatgccatttaggtgacaatgatttacactctctagaatctgttgtatacaatgactggcatcagcctcactgtaatattctcttgccactatgtcttcaaagagttcgccaccagtaactaagtcaaacaccaagtaatggaagccctcttcggatatgctgtcatgaagtctcacaatattggggtgcttcaagagacggcagattctagcttccctttccagtttctgatgatccctagcagaaagctttttggtgttgataattttggcagcatactcttgtccagtagggattttcatgcatcttctcaccactgagaatgccccctttccgagctcctcgaagagctgatactcgtcggtgaaccgggtgcaggtggtggtcgaagccatggcggggtctggacagtgcgacgggcgacacgcgaacagacgcggcttcccgggactggcaccgccgcgctgtcacccggggccgccctcactttccttgtccgaaagtagctcgccggcgagggagtgcgcgcaggggcggggcgcgcggggcgaggtggccagaccagcccgagccgcgatccttcttcctcctcctcccgccgggcgagcgctcccgaa

SEQ ID NO: 363 - RNA, 4782 nt, Macaca mulatta
  source 1..4782: mol_type = mRNA
ccctgcatcttcccgctcagtcagccccagattgaggcaggcttctctgtgcgggtttaaatgggtaactgacgtctcgcctcattcacccaaacctccaggcttctcccccgcaaatcctcctccacccacctggtttctcctagacgggtgtgctcgtgtgtgcgaccgaaggagggatagcgagagatccacgaagggacacacttggagtcgctagagggaggtgtgggaccagcgaggagggggcttcgccagggagggggtgctggctggcggagggagcggcgggaggaggcgccaggggaggagacggaggcctggggacggcagacgaggcttcgtccgagccgagcgctctttctctcgctgcgccgtcttgaagccgcgcgggctcgtgagcagcgcgaggcagtcaaggtgcctcgcttcgccggatccgctgctgcccgctggagggaagccggtcccgggcgcgcacgctcgcccgagccccgggcgcgctccgcgcctgagcctgctgacagctgccgctgggctctggctgtccgctccgggctccgcggcctcggccccgctgcactccacctccgccccctcggactccctcccctctgcttctacccctcctgcctccagtgcggatcgtttcgcaactgcttgccactcgccccgtgcccggctgtttttccatttcccggccccctcttcttgaatactttaccccctgtatttggggacagggactggaaaaggggcaggtggagcgtccagtggagaagaaggaagcgaggcccgcaggaggaggaggatcggcggaccgtggggaggagaccccacgccaccgtttctggtcatctcccctcccgccccgcccctgcgcacactccctcgcgggcgagctactttcggaccaggaaagtaagggcggccctgggtgacagcgccgcggggccaatcccggggttagccgcgcgtctgctcgcttctcgtccgtcgcgctcccagccagggcacagcccggaccaaggatggcttcgaccacaacctgcaccaggttcacggacgagtatcagcttttcgaggagcttggaaagggggcattctcagtggtgagaagatgtatgaaaattcctactggacaagaatatgctgccaaaattatcaacaccaaaaagctttctgctagggatcatcagaaactagaaagagaagctagaatctgccgtcttttgaagcaccctaatattgtgcgacttcatgatagcatatcagaggagggctttcactacttggtgtttgatttagttaccggaggtgaactgtttgaagacatagtggcaagagaatactacagtgaagctgatgccagtcattgtatacagcagattctagaaagtgtaaatcattgtcacctaaatggcatagttcacagggacctgaagcctgagaatttgcttttagctagcaaatccaagggagcagctgtgaaattggcagactttggcttagccatagaagttcaaggggaccagcaggcgtggtttggttttgctggcacacctggatatctttctccagaagttttacgtaaagatccttatggaaagccagtggatatgtgggcatgtggtgtcattctctatattctacttgtggggtatccacccttctgggatgaagaccaacacagactctatcagcagatcaaggctggagcttatgattttccatcaccggaatgggacacggtaactcctgaagccaaagacctcatcaataaaatgcttactatcaaccctgccaaacgtatcacagcctcagaggcactgaagcacccatggatctgtcaacgttctactgttgcttccatgatgcacagacaggagactgtagactgcttgaagaaatttaatgctagaagaaaactaaagggtgccatcttgacaactatgctggctacaagaaatttctcagcagccaagagtttgttgaagaaaccagatggagtaaagataaacaacaaagccaacgtggtaaccagccccaaagaaaatattcctaccccggcgctggagccccaaactactgtaatccacaaccctgatggaaacaaggagtcaactgagagttcaaatacaacaattgaggatgaagatgtgaaagcacgaaagcaagagattatcaaagtcaccgaacaactgattgaagctatcaacaacggggactttgaagcctacacaaaaatctgtgacccaggccttactgcttttgaacctgaagctctgggtaatttagtggaagggatggattttcaccgattctacttcgaaaatgctttgtccaaaagcaataaaccaatccacactattattctaaaccctcatgtacatctggtaggggatgatgccgcctgcatagcgtatattaggctcacacagtacatggatggcagtggaatgccaaagacaatgcagtcagaagagactcgtgtgtggcaccgtcgagatggaaagtggcagaatgttcattttcatcgctcggggtcaccaacagtacccatcaagccaccctgtattccaaatgggaaagaaaacttctcaggaggcacctctttgtggcaaaacatctaaggcctgaaaatcattcacatatgggtcttctaaatatcaacagtgccacttctgcattctctgttctcaaggcacctggatggtgaccctgggccgtcctctcctcctcttcatgcatgtttctgagtgcatgaagttgtgaaggtcctacatgtaatgcatatgtgatgcatcatcttatcatatattccttcctatacattgtttacacttcaactacggggatgttccgtgcaaacttaaattactgttggcaaaacaatagggggagattagacaaaaagaaaaaatccacaatattccaagtacaactcttcatcaagtttctctgttaatgccaagatttaacagacttaagaactattgttctctgaatgacagtttgtaagagaaatgtaaattttttagaactctttgctgttaatctgttttggcttgtttggtttttttgggtttttttgtttttgtttttgttttttttaaggtaaaaaaatataccttcagtttcctggtgtgatcctggttaaaatggatgatttttcatgggaagttttgctgattagcaattaaagtgggttgatatgttggcaaaatcacttatgaaagtagaagcaagaatcagttggtttgctaccacataaagccatgctctttttggtcaaactgtgtaaactggaaaaattcacatcatttctgagtttaatcactttaggatatattcacattgttttggtgaatttgctgaattgaattgtttttctttctcgaatctgtgatctcttttctttatcctgtttctttgttcctttcgtttgcttccttttttatttttcttttgttccattcttttcttactttcttcccttttccttttttgaggaggccggctagtagtgtgtgagaaaagaaaaaaagtgaaatttgcataatgaaggtaaaaaggaaataaaagccttttgaaggtggcttaactagcacttttgatcatcttcagggcccacaaaaatgttgtcaagattttaaaggtttataattctgcttaagctctactttggacttaggtatcctaactatgttggaggtatttgaattgtttaaacttaggataaaagcaagttcctcctgtgactgcaacgtcttactgattgggacagttgccaggaggataccaagttgatagcagagggggtgttatgcaaacgcactcacctccgccttggggaatgaaagggtcacttctgcatcatcactagctagttttctagcgttagagaggcttacaaatgtttgccattctcatacgtgttttgaacttgatctttgtgacttgtgttttttagcttctctcttgaatcagagtatcgttatcttcctccaaggagttaggattttccagtttaaaacaaaaagggaaatgtcctaggttttctttgtgcttctcatttttcctttgttgattgaattcctgtgatttttttgttctcttctctgaaatgctttacagtgcatggaatctccatcattgttattttaacggtagtaattcacagtcctcagaagcctgtttttaaagcagaagcaaaaaaggaaaacaaagcagcaaaaacaacccttcgtcttttctctcatctcacctttctgtgttgattactaatcatcttagatattattgctagtggatgaatggtagatgggttgaagcttttctgataattattacacaatttaaaacaatatatatttaaaataaatatatacagtcaatatattgagccatgttaacctgccaatgagatctgtgaaaaaaataatggcctcatttttccctttttaatttcttttacccttttgtgaagcagctatacgtggcatacatgtatttaaagaaaaaaataggtgtagagtgtttttttttacacttttagcatgtggtgttgaagtattactgtagatcaagtttgtcttccgcactaagatgtgaggaaattgtgatttgttctctccaccacaaatgaactacacatttattatcttctatcattttgaaacactgcagtttaccatgcgacactgtatatatttcttgccataatggtaaatgactgattgatatatttaagagttaataaatttgtgatttctgctgaca

SEQ ID NO: 364 - RNA, 4782 nt, Macaca mulatta
  source 1..4782: mol_type = mRNA
tgtcagcagaaatcacaaatttattaactcttaaatatatcaatcagtcatttaccattatggcaagaaatatatacagtgtcgcatggtaaactgcagtgtttcaaaatgatagaagataataaatgtgtagttcatttgtggtggagagaacaaatcacaatttcctcacatcttagtgcggaagacaaacttgatctacagtaatacttcaacaccacatgctaaaagtgtaaaaaaaaacactctacacctatttttttctttaaatacatgtatgccacgtatagctgcttcacaaaagggtaaaagaaattaaaaagggaaaaatgaggccattatttttttcacagatctcattggcaggttaacatggctcaatatattgactgtatatatttattttaaatatatattgttttaaattgtgtaataattatcagaaaagcttcaacccatctaccattcatccactagcaataatatctaagatgattagtaatcaacacagaaaggtgagatgagagaaaagacgaagggttgtttttgctgctttgttttccttttttgcttctgctttaaaaacaggcttctgaggactgtgaattactaccgttaaaataacaatgatggagattccatgcactgtaaagcatttcagagaagagaacaaaaaaatcacaggaattcaatcaacaaaggaaaaatgagaagcacaaagaaaacctaggacatttccctttttgttttaaactggaaaatcctaactccttggaggaagataacgatactctgattcaagagagaagctaaaaaacacaagtcacaaagatcaagttcaaaacacgtatgagaatggcaaacatttgtaagcctctctaacgctagaaaactagctagtgatgatgcagaagtgaccctttcattccccaaggcggaggtgagtgcgtttgcataacaccccctctgctatcaacttggtatcctcctggcaactgtcccaatcagtaagacgttgcagtcacaggaggaacttgcttttatcctaagtttaaacaattcaaatacctccaacatagttaggatacctaagtccaaagtagagcttaagcagaattataaacctttaaaatcttgacaacatttttgtgggccctgaagatgatcaaaagtgctagttaagccaccttcaaaaggcttttatttcctttttaccttcattatgcaaatttcactttttttcttttctcacacactactagccggcctcctcaaaaaaggaaaagggaagaaagtaagaaaagaatggaacaaaagaaaaataaaaaaggaagcaaacgaaaggaacaaagaaacaggataaagaaaagagatcacagattcgagaaagaaaaacaattcaattcagcaaattcaccaaaacaatgtgaatatatcctaaagtgattaaactcagaaatgatgtgaatttttccagtttacacagtttgaccaaaaagagcatggctttatgtggtagcaaaccaactgattcttgcttctactttcataagtgattttgccaacatatcaacccactttaattgctaatcagcaaaacttcccatgaaaaatcatccattttaaccaggatcacaccaggaaactgaaggtatatttttttaccttaaaaaaaacaaaaacaaaaacaaaaaaacccaaaaaaaccaaacaagccaaaacagattaacagcaaagagttctaaaaaatttacatttctcttacaaactgtcattcagagaacaatagttcttaagtctgttaaatcttggcattaacagagaaacttgatgaagagttgtacttggaatattgtggattttttctttttgtctaatctccccctattgttttgccaacagtaatttaagtttgcacggaacatccccgtagttgaagtgtaaacaatgtataggaaggaatatatgataagatgatgcatcacatatgcattacatgtaggaccttcacaacttcatgcactcagaaacatgcatgaagaggaggagaggacggcccagggtcaccatccaggtgccttgagaacagagaatgcagaagtggcactgttgatatttagaagacccatatgtgaatgattttcaggccttagatgttttgccacaaagaggtgcctcctgagaagttttctttcccatttggaatacagggtggcttgatgggtactgttggtgaccccgagcgatgaaaatgaacattctgccactttccatctcgacggtgccacacacgagtctcttctgactgcattgtctttggcattccactgccatccatgtactgtgtgagcctaatatacgctatgcaggcggcatcatcccctaccagatgtacatgagggtttagaataatagtgtggattggtttattgcttttggacaaagcattttcgaagtagaatcggtgaaaatccatcccttccactaaattacccagagcttcaggttcaaaagcagtaaggcctgggtcacagatttttgtgtaggcttcaaagtccccgttgttgatagcttcaatcagttgttcggtgactttgataatctcttgctttcgtgctttcacatcttcatcctcaattgttgtatttgaactctcagttgactccttgtttccatcagggttgtggattacagtagtttggggctccagcgccggggtaggaatattttctttggggctggttaccacgttggctttgttgtttatctttactccatctggtttcttcaacaaactcttggctgctgagaaatttcttgtagccagcatagttgtcaagatggcaccctttagttttcttctagcattaaatttcttcaagcagtctacagtctcctgtctgtgcatcatggaagcaacagtagaacgttgacagatccatgggtgcttcagtgcctctgaggctgtgatacgtttggcagggttgatagtaagcattttattgatgaggtctttggcttcaggagttaccgtgtcccattccggtgatggaaaatcataagctccagccttgatctgctgatagagtctgtgttggtcttcatcccagaagggtggataccccacaagtagaatatagagaatgacaccacatgcccacatatccactggctttccataaggatctttacgtaaaacttctggagaaagatatccaggtgtgccagcaaaaccaaaccacgcctgctggtccccttgaacttctatggctaagccaaagtctgccaatttcacagctgctcccttggatttgctagctaaaagcaaattctcaggcttcaggtccctgtgaactatgccatttaggtgacaatgatttacactttctagaatctgctgtatacaatgactggcatcagcttcactgtagtattctcttgccactatgtcttcaaacagttcacctccggtaactaaatcaaacaccaagtagtgaaagccctcctctgatatgctatcatgaagtcgcacaatattagggtgcttcaaaagacggcagattctagcttctctttctagtttctgatgatccctagcagaaagctttttggtgttgataattttggcagcatattcttgtccagtaggaattttcatacatcttctcaccactgagaatgccccctttccaagctcctcgaaaagctgatactcgtccgtgaacctggtgcaggttgtggtcgaagccatccttggtccgggctgtgccctggctgggagcgcgacggacgagaagcgagcagacgcgcggctaaccccgggattggccccgcggcgctgtcacccagggccgcccttactttcctggtccgaaagtagctcgcccgcgagggagtgtgcgcaggggcggggcgggaggggagatgaccagaaacggtggcgtggggtctcctccccacggtccgccgatcctcctcctcctgcgggcctcgcttccttcttctccactggacgctccacctgccccttttccagtccctgtccccaaatacagggggtaaagtattcaagaagagggggccgggaaatggaaaaacagccgggcacggggcgagtggcaagcagttgcgaaacgatccgcactggaggcaggaggggtagaagcagaggggagggagtccgagggggcggaggtggagtgcagcggggccgaggccgcggagcccggagcggacagccagagcccagcggcagctgtcagcaggctcaggcgcggagcgcgcccggggctcgggcgagcgtgcgcgcccgggaccggcttccctccagcgggcagcagcggatccggcgaagcgaggcaccttgactgcctcgcgctgctcacgagcccgcgcggcttcaagacggcgcagcgagagaaagagcgctcggctcggacgaagcctcgtctgccgtccccaggcctccgtctcctcccctggcgcctcctcccgccgctccctccgccagccagcaccccctccctggcgaagccccctcctcgctggtcccacacctccctctagcgactccaagtgtgtcccttcgtggatctctcgctatccctccttcggtcgcacacacgagcacacccgtctaggagaaaccaggtgggtggaggaggatttgcgggggagaagcctggaggtttgggtgaatgaggcgagacgtcagttacccatttaaacccgcacagagaagcctgcctcaatctggggctgactgagcgggaagatgcaggg

SEQ ID NO: 365 - RNA, 3243 nt, Homo sapiens
  source 1..3243: mol_type = mRNA
gccacaagcctccaccccagctggtcccccacccaggctgcccagtttaacattcctagtcataggaccttgacttctgagaggcctgattgtcatctgtaaataaggggtaggactaaagcactcctcctggaggactgagagatgggctggaccggagcacttgagtctgggatatgtgaccatgctacctttgtctccctgtcctgttccttcccccagccccaaatccagggttttccaaagtgtggttcaagaaccacctgcatctgaatctagaggtactggatacaaccccacgtctgggccgttacccaggacattctacatgagaacgtgggggtggggccctggctgcacctgaactgtcacctggagtcagggtggaaggtggaagaactgggtcttatttccttctccccttgttctttagggtctgtccttctgcagactccgttaccccaccctaaccatcctgcacacccttggagccctctgggccaatgccctgtcccgcaaagggcttctcaggcatctcacctctatgggagggcatttttggcccccagaaccttacacggtgtttatgtggggaagcccctgggaagcagacagtcctagggtgaagctgagaggcagagagaaggggagacagacagagggtggggctttcccccttgtctccagtgccctttctggtgaccctcggttcttttcccccaccacccccccagcggagcccatcgtggtgaggcttaaggaggtccgactgcagagggacgacttcgagattctgaaggtgatcggacgcggggcgttcagcgaggtagcggtagtgaagatgaagcagacgggccaggtgtatgccatgaagatcatgaacaagtgggacatgctgaagaggggcgaggtgtcgtgcttccgtgaggagagggacgtgttggtgaatggggaccggcggtggatcacgcagctgcacttcgccttccaggatgagaactacctgtacctggtcatggagtattacgtgggcggggacctgctgacactgctgagcaagtttggggagcggattccggccgagatggcgcgcttctacctggcggagattgtcatggccatagactcggtgcaccggcttggctacgtgcacagggacatcaaacccgacaacatcctgctggaccgctgtggccacatccgcctggccgacttcggctcttgcctcaagctgcgggcagatggaacggtgcggtcgctggtggctgtgggcaccccagactacctgtcccccgagatcctgcaggctgtgggcggtgggcctgggacaggcagctacgggcccgagtgtgactggtgggcgctgggtgtattcgcctatgaaatgttctatgggcagacgcccttctacgcggattccacggcggagacctatggcaagatcgtccactacaaggagcacctctctctgccgctggtggacgaaggggtccctgaggaggctcgagacttcattcagcggttgctgtgtcccccggagacacggctgggccggggtggagcaggcgacttccggacacatcccttcttctttggcctcgactgggatggtctccgggacagcgtgcccccctttacaccggatttcgaaggtgccaccgacacatgcaacttcgacttggtggaggacgggctcactgccatggtgagcgggggcggggagacactgtcggacattcgggaaggtgcgccgctaggggtccacctgccttttgtgggctactcctactcctgcatggccctcagggacagtgaggtcccaggccccacacccatggaactggaggccgagcagctgcttgagccacacgtgcaagcgcccagcctggagccctcggtgtccccacaggatgaaacagctgaagtggcagttccagcggctgtccctgcggcagaggctgaggccgaggtgacgctgcgggagctccaggaagccctggaggaggaggtgctcacccggcagagcctgagccgggagatggaggccatccgcacggacaaccagaacttcgccagtcaactacgcgaggcagaggctcggaaccgggacctagaggcacacgtccggcagttgcaggagcggatggagttgctgcaggcagagggagccacagctgtcacgggggtccccagtccccgggccacggatccaccttcccatctagatggccccccggccgtggctgtgggccagtgcccgctggtggggccaggccccatgcaccgccgccacctgctgctccctgccagggtccctaggcctggcctatcggaggcgctttccctgctcctgttcgccgttgttctgtctcgtgccgccgccctgggctgcattgggttggtggcccacgccggccaactcaccgcagtctggcgccgcccaggagccgcccgcgctccctgaaccctagaactgtcttcgactccggggccccgttggaagactgagtgcccggggcacggcacagaagccgcgcccaccgcctgccagttcacaaccgctccgagcgtgggtctccgcccagctccagtcctgtgatccgggcccgccccctagcggccggggagggaggggccgggtccgcggccggcgaacggggctcgaagggtccttgtagccgggaatgctgctgctgctgctgctgctgctgctgctgctgctgctgctgctgctgctgctgctgctggggggatcacagaccatttctttctttcggccaggctgaggccctgacgtggatgggcaaactgcaggcctgggaaggcagcaagccgggccgtccgtgttccatcctccacgcacccccacctatcgttggttcgcaaagtgcaaagctttcttgtgcatgacgccctgctctggggagcgtctggcgcgatctctgcctgcttactcgggaaatttgcttttgccaaacccgctttttcggggatcccgcgcccccctcctcacttgcgctgctctcggagccccagccggctccgcccgcttcggcggtttggatatttattgacctcgtcctccgactcgctgacaggctacaggacccccaacaaccccaatccacgttttggatgcactgagaccccgacattcctcggtatttattgtctgtccccacctaggacccccacccccgaccctcgcgaataaaaggccctccatctgcccaaagctctgga

SEQ ID NO: 366 - RNA, 3243 nt, Homo sapiens
  source 1..3243: mol_type = mRNA
tccagagctttgggcagatggagggccttttattcgcgagggtcgggggtgggggtcctaggtggggacagacaataaataccgaggaatgtcggggtctcagtgcatccaaaacgtggattggggttgttgggggtcctgtagcctgtcagcgagtcggaggacgaggtcaataaatatccaaaccgccgaagcgggcggagccggctggggctccgagagcagcgcaagtgaggaggggggcgcgggatccccgaaaaagcgggtttggcaaaagcaaatttcccgagtaagcaggcagagatcgcgccagacgctccccagagcagggcgtcatgcacaagaaagctttgcactttgcgaaccaacgataggtgggggtgcgtggaggatggaacacggacggcccggcttgctgccttcccaggcctgcagtttgcccatccacgtcagggcctcagcctggccgaaagaaagaaatggtctgtgatccccccagcagcagcagcagcagcagcagcagcagcagcagcagcagcagcagcagcagcagcagcattcccggctacaaggacccttcgagccccgttcgccggccgcggacccggcccctccctccccggccgctagggggcgggcccggatcacaggactggagctgggcggagacccacgctcggagcggttgtgaactggcaggcggtgggcgcggcttctgtgccgtgccccgggcactcagtcttccaacggggccccggagtcgaagacagttctagggttcagggagcgcgggcggctcctgggcggcgccagactgcggtgagttggccggcgtgggccaccaacccaatgcagcccagggcggcggcacgagacagaacaacggcgaacaggagcagggaaagcgcctccgataggccaggcctagggaccctggcagggagcagcaggtggcggcggtgcatggggcctggccccaccagcgggcactggcccacagccacggccggggggccatctagatgggaaggtggatccgtggcccggggactggggacccccgtgacagctgtggctccctctgcctgcagcaactccatccgctcctgcaactgccggacgtgtgcctctaggtcccggttccgagcctctgcctcgcgtagttgactggcgaagttctggttgtccgtgcggatggcctccatctcccggctcaggctctgccgggtgagcacctcctcctccagggcttcctggagctcccgcagcgtcacctcggcctcagcctctgccgcagggacagccgctggaactgccacttcagctgtttcatcctgtggggacaccgagggctccaggctgggcgcttgcacgtgtggctcaagcagctgctcggcctccagttccatgggtgtggggcctgggacctcactgtccctgagggccatgcaggagtaggagtagcccacaaaaggcaggtggacccctagcggcgcaccttcccgaatgtccgacagtgtctccccgcccccgctcaccatggcagtgagcccgtcctccaccaagtcgaagttgcatgtgtcggtggcaccttcgaaatccggtgtaaaggggggcacgctgtcccggagaccatcccagtcgaggccaaagaagaagggatgtgtccggaagtcgcctgctccaccccggcccagccgtgtctccgggggacacagcaaccgctgaatgaagtctcgagcctcctcagggaccccttcgtccaccagcggcagagagaggtgctccttgtagtggacgatcttgccataggtctccgccgtggaatccgcgtagaagggcgtctgcccatagaacatttcataggcgaatacacccagcgcccaccagtcacactcgggcccgtagctgcctgtcccaggcccaccgcccacagcctgcaggatctcgggggacaggtagtctggggtgcccacagccaccagcgaccgcaccgttccatctgcccgcagcttgaggcaagagccgaagtcggccaggcggatgtggccacagcggtccagcaggatgttgtcgggtttgatgtccctgtgcacgtagccaagccggtgcaccgagtctatggccatgacaatctccgccaggtagaagcgcgccatctcggccggaatccgctccccaaacttgctcagcagtgtcagcaggtccccgcccacgtaatactccatgaccaggtacaggtagttctcatcctggaaggcgaagtgcagctgcgtgatccaccgccggtccccattcaccaacacgtccctctcctcacggaagcacgacacctcgcccctcttcagcatgtcccacttgttcatgatcttcatggcatacacctggcccgtctgcttcatcttcactaccgctacctcgctgaacgccccgcgtccgatcaccttcagaatctcgaagtcgtccctctgcagtcggacctccttaagcctcaccacgatgggctccgctgggggggtggtgggggaaaagaaccgagggtcaccagaaagggcactggagacaagggggaaagccccaccctctgtctgtctccccttctctctgcctctcagcttcaccctaggactgtctgcttcccaggggcttccccacataaacaccgtgtaaggttctgggggccaaaaatgccctcccatagaggtgagatgcctgagaagccctttgcgggacagggcattggcccagagggctccaagggtgtgcaggatggttagggtggggtaacggagtctgcagaaggacagaccctaaagaacaaggggagaaggaaataagacccagttcttccaccttccaccctgactccaggtgacagttcaggtgcagccagggccccacccccacgttctcatgtagaatgtcctgggtaacggcccagacgtggggttgtatccagtacctctagattcagatgcaggtggttcttgaaccacactttggaaaaccctggatttggggctgggggaaggaacaggacagggagacaaaggtagcatggtcacatatcccagactcaagtgctccggtccagcccatctctcagtcctccaggaggagtgctttagtcctaccccttatttacagatgacaatcaggcctctcagaagtcaaggtcctatgactaggaatgttaaactgggcagcctgggtgggggaccagctggggtggaggcttgtggc

SEQ ID NO: 367 - RNA, 2752 nt, Mus musculus
  source 1..2752: mol_type = mRNA
agagagacccaagggatagtcagggacgggcagacatgcagctagggttctggggcctggacaggggcagccaggccctgtgacgggaagaccccgagctccggcccggggaggggccatggtgttgcctgcccaacatgtcagccgaagtgcggctgaggcagctccagcagctggtgctggacccaggcttcctgggactggagcccctgctcgaccttctcctgggcgtccaccaggagctgggtgcctctcacctagcccaggacaagtatgtggccgacttcttgcagtgggtggagcccattgcagcaaggcttaaggaggtccgactgcagagggatgattttgagattttgaaggtgatcgggcgtggggcgttcagcgaggtagcggtggtgaagatgaaacagacgggccaagtgtatgccatgaagattatgaataagtgggacatgctgaagagaggcgaggtgtcgtgcttccgggaagaaagggatgtattagtgaaaggggaccggcgctggatcacacagctgcactttgccttccaggatgagaactacctgtacctggtcatggaatactacgtgggcggggacctgctaacgctgctgagcaagtttggggagcggatccccgccgagatggctcgcttctacctggccgagattgtcatggccatagactccgtgcaccggctgggctacgtgcacagggacatcaaaccagataacattctgctggaccgatgtgggcacattcgcctggcagacttcggctcctgcctcaaactgcagcctgatggaatggtgaggtcgctggtggctgtgggcaccccggactacctgtctcctgagattctgcaggccgttggtggagggcctggggcaggcagctacgggccagagtgtgactggtgggcactgggcgtgttcgcctatgagatgttctatgggcagacccccttctacgcggactccacagccgagacatatgccaagattgtgcactacagggaacacttgtcgctgccgctggcagacacagttgtccccgaggaagctcaggacctcattcgtgggctgctgtgtcctgctgagataaggctaggtcgaggtggggcaggtgatttccagaaacatcctttcttctttggccttgattgggagggtctccgagacagtgtacccccctttacaccagacttcgagggtgccacggacacatgcaatttcgatgtggtggaggaccggctcactgccatggtgagcgggggcggggagacgctgtcagacatgcaggaagacatgccccttggggtgcgcctgcccttcgtgggctactcctactgctgcatggccttcagagacaatcaggtcccggaccccacccctatggaactagaggccctgcagttgcctgtgtcagacttgcaagggcttgacttgcagcccccagtgtccccaccggatcaagtggctgaagaggctgacctagtggctgtccctgcccctgtggctgaggcagagaccacggtaacgctgcagcagctccaggaagccctggaagaagaggttctcacccggcagagcctgagccgcgagctggaggccatccggaccgccaaccagaacttctccagccaactacaggaggccgaggtccgaaaccgagacctggaggcgcatgttcggcagctacaggaacggatggagatgctgcaggccccaggagccgcagccatcacgggggtccccagtccccgggccacggatccaccttcccatctagatggccccccggccgtggctgtgggccagtgcccgctggtggggccaggccccatgcaccgccgtcacctgctgctccctgccaggatccctaggcctggcctatccgaggcgcgttgcctgctcctgttcgccgctgctctggctgctgccgccacactgggctgcactgggttggtggcctataccggcggtctcaccccagtctggtgtttcccgggagccaccttcgccccctgaaccctaagactccaagccatctttcatttaggcctcctaggaaggtcgagcgaccagggagcgacccaaagcgtctctgtgcccatcgcgccccccccccccccccaccgctccgctccacacttctgtgagcctgggtccccacccagctccgctcctgtgatccaggcctgccacctggcggccggggagggaggaacagggctcgtgcccagcacccctggttcctgcagagctggtagccaccgctgctgcagcagctgggcattcgccgaccttgctttactcagccccgacgtggatgggcaaactgctcagctcatccgatttcactttttcactctcccagccatcagttacaagccataagcatgagccccctatttccagggacatcccattcccatagtgatggatcagcaagacctctgccagcacacacggagtctttggcttcggacagcctcactcctgggggttgctgcaactccttccccgtgtacacgtctgcactctaacaacggagccacagctgcactcccccctcccccaaagcagtgtgggtatttattgatcttgttatctgactcactgacagactccgggacccacgttttagatgcattgagactcgacattcctcggtatttattgtctgtccccacctacgacctccactcccgacccttgcgaataaaatacttctggtctgccctaaa

SEQ ID NO: 368 - RNA, 2752 nt, Mus musculus
  source 1..2752: mol_type = mRNA
tttagggcagaccagaagtattttattcgcaagggtcgggagtggaggtcgtaggtggggacagacaataaataccgaggaatgtcgagtctcaatgcatctaaaacgtgggtcccggagtctgtcagtgagtcagataacaagatcaataaatacccacactgctttgggggaggggggagtgcagctgtggctccgttgttagagtgcagacgtgtacacggggaaggagttgcagcaacccccaggagtgaggctgtccgaagccaaagactccgtgtgtgctggcagaggtcttgctgatccatcactatgggaatgggatgtccctggaaatagggggctcatgcttatggcttgtaactgatggctgggagagtgaaaaagtgaaatcggatgagctgagcagtttgcccatccacgtcggggctgagtaaagcaaggtcggcgaatgcccagctgctgcagcagcggtggctaccagctctgcaggaaccaggggtgctgggcacgagccctgttcctccctccccggccgccaggtggcaggcctggatcacaggagcggagctgggtggggacccaggctcacagaagtgtggagcggagcggtggggggggggggggggcgcgatgggcacagagacgctttgggtcgctccctggtcgctcgaccttcctaggaggcctaaatgaaagatggcttggagtcttagggttcagggggcgaaggtggctcccgggaaacaccagactggggtgagaccgccggtataggccaccaacccagtgcagcccagtgtggcggcagcagccagagcagcggcgaacaggagcaggcaacgcgcctcggataggccaggcctagggatcctggcagggagcagcaggtgacggcggtgcatggggcctggccccaccagcgggcactggcccacagccacggccggggggccatctagatgggaaggtggatccgtggcccggggactggggacccccgtgatggctgcggctcctggggcctgcagcatctccatccgttcctgtagctgccgaacatgcgcctccaggtctcggtttcggacctcggcctcctgtagttggctggagaagttctggttggcggtccggatggcctccagctcgcggctcaggctctgccgggtgagaacctcttcttccagggcttcctggagctgctgcagcgttaccgtggtctctgcctcagccacaggggcagggacagccactaggtcagcctcttcagccacttgatccggtggggacactgggggctgcaagtcaagcccttgcaagtctgacacaggcaactgcagggcctctagttccataggggtggggtccgggacctgattgtctctgaaggccatgcagcagtaggagtagcccacgaagggcaggcgcaccccaaggggcatgtcttcctgcatgtctgacagcgtctccccgcccccgctcaccatggcagtgagccggtcctccaccacatcgaaattgcatgtgtccgtggcaccctcgaagtctggtgtaaaggggggtacactgtctcggagaccctcccaatcaaggccaaagaagaaaggatgtttctggaaatcacctgccccacctcgacctagccttatctcagcaggacacagcagcccacgaatgaggtcctgagcttcctcggggacaactgtgtctgccagcggcagcgacaagtgttccctgtagtgcacaatcttggcatatgtctcggctgtggagtccgcgtagaagggggtctgcccatagaacatctcataggcgaacacgcccagtgcccaccagtcacactctggcccgtagctgcctgccccaggccctccaccaacggcctgcagaatctcaggagacaggtagtccggggtgcccacagccaccagcgacctcaccattccatcaggctgcagtttgaggcaggagccgaagtctgccaggcgaatgtgcccacatcggtccagcagaatgttatctggtttgatgtccctgtgcacgtagcccagccggtgcacggagtctatggccatgacaatctcggccaggtagaagcgagccatctcggcggggatccgctccccaaacttgctcagcagcgttagcaggtccccgcccacgtagtattccatgaccaggtacaggtagttctcatcctggaaggcaaagtgcagctgtgtgatccagcgccggtcccctttcactaatacatccctttcttcccggaagcacgacacctcgcctctcttcagcatgtcccacttattcataatcttcatggcatacacttggcccgtctgtttcatcttcaccaccgctacctcgctgaacgccccacgcccgatcaccttcaaaatctcaaaatcatccctctgcagtcggacctccttaagccttgctgcaatgggctccacccactgcaagaagtcggccacatacttgtcctgggctaggtgagaggcacccagctcctggtggacgcccaggagaaggtcgagcaggggctccagtcccaggaagcctgggtccagcaccagctgctggagctgcctcagccgcacttcggctgacatgttgggcaggcaacaccatggcccctccccgggccggagctcggggtcttcccgtcacagggcctggctgcccctgtccaggccccagaaccctagctgcatgtctgcccgtccctgactatcccttgggtctctct

SEQ ID NO: 369 - RNA, 2762 nt, Rattus norvegicus
  source 1..2762: mol_type = mRNA
agagagacccaggggatagtcagggacaggcagacatgcagccagggttctggggcctggacaggggcagccaggccccgtgacgggaggaccccgagctccggcccggggaggggccatggtgttgcctgcccaacatgtcagccgaagtgcggctgaggcagctccagcagctggtgctggacccaggcttcctggggctggagcccctgctcgaccttctcctgggcgtccaccaggagctgggcgcctcccacctagcccaggacaagtatgtggccgactttttgcaatgggtggagcccattgcagcaaggcttaaggaggtccgactgcagagggatgactttgagattttgaaggtgatcgggcgtggggcgttcagtgaggtagcggtggtgaagatgaaacagaccggccaagtgtatgccatgaagattatgaataagtgggacatgctgaagagaggcgaggtgtcatgcttccgggaagaaagggatgtattagtgaaaggggaccggcgctggatcacacagttgcactttgccttccaggatgagaactacctgtacctggtcatggaatactacgtgggcggggacctgctaacgctgctgagcaagtttggggagcggatccccgccgagatggcgcgcttctacctggccgagattgtcatggccatagactcggtgcaccggctgggctacgtgcacagggacatcaaaccagataacattctgctggaccgatgtgggcacattcgcctggcagattttggctcctgcctcaaattgcagcctgatggaacggtgaggtcgctggtggctgtgggcaccccggactacctgtctcctgagattctgcaggctgttggtggagggcctggggcaggcagctacgggccagagtgtgactggtgggcactgggcgtgtttgcctacgaaatgttctatgggcagacacccttctacgccgactccacagccgagacgtatgccaaaattgtgcattacagggaacacttgtctctgcctcgggcagacatgggtgtccctgaggaagctcaggacctcattcgtgggctgctgtgtcctgctgagataaggctcggtagaggtggggcaggtgacttccagaagcatcctttcttctttggccttgattgggagggtctccgggacagcgtgccccccttcacaccagacttcgagggtgccacagacacatgcaattttgatgtggtggaggaccggctcactgccatggtgagcgggggcggggagacactgtccgacatgcaggaagacatggcactcggggtgcacctgccttttgtgggttactcctactcttgcatggcctcaagagacaatcaggtcacggaccccacccctatggaactagaggccctgcagttgcctgtgtcagacttgcaagggcttgacttgccgccccccgtgtccccaccggatcaagcggctgaagaggctgaccccgcggctgtccctgtccctccggctgagacagagaccatggtgacgctgcgggagctccaggaagccttggaagaagaggttctcacccggcagagcctgagccgcgagctggaggccatccgtaccgctaaccagaacttctccagccaactacaggaggccgaggtccggaaccgagacctggaggcgcatgttcggcagctacaggagcggatggagatgctgcaggccccaggagctgcagctgtcacgggggtccccagtccccgggccacggatccaccttcccatctagatggccccccggccgtggctgtgggccagtgcccgctggtggggccaggccccatgcaccgccgtcacctgctgttccctgccagggtccctaggcctggcctatccgaggcgcattgcctgctcctgttcgccgctgctctggctgctgccgccacactgggctgcactgggttggtggcctataccggccgtctcaccccagtctggtgtttctcgggagccaccttcgccccctgaaccctaagactccaagccatttttcatttaggcctcctaggaaggtcgagtgaccagagaaagacccagagcctctctgtgcccatattcacccccgaccccccactgctctgctccactccacacttctgtgagcctgggtccctatcctgctccgctcctgtgatccgggcccgccccctggcggctggggagggaggaagagggctcgtgcccagcaccccggttcctgcagagctactgctgactactactgcagcccaggcattcgccaaccatgcttttactcagccccgacgtggatgggcaaactggtcagctcatccgatttcacttttcacgcccccagccatcagttaaaagccataagcaataagtcccttatctctggagacatcccattcccataaggaaggatgagcaagacctctgccagcacacatgggagtctttggcttcggacagtctcactcctgggggttctgcaactccttcctcacgtacactcccgtactctcccgtcggagccacggctgcacacacccccaaggcagtgtgggtatttattgaccttgttctctgactcactgacagactccgggacccacgttttggatgcactgagactcgacattcctcggtatttattgtctgtccccacctacgacctccactcctgaccctcgcaaataaaatacttctggctgccctaaaaaaaaaaaaaaaaaa

SEQ ID NO: 370 - RNA, 2762 nt, Rattus norvegicus
  source 1..2762: mol_type = mRNA
ttttttttttttttttttagggcagccagaagtattttatttgcgagggtcaggagtggaggtcgtaggtggggacagacaataaataccgaggaatgtcgagtctcagtgcatccaaaacgtgggtcccggagtctgtcagtgagtcagagaacaaggtcaataaatacccacactgccttgggggtgtgtgcagccgtggctccgacgggagagtacgggagtgtacgtgaggaaggagttgcagaacccccaggagtgagactgtccgaagccaaagactcccatgtgtgctggcagaggtcttgctcatccttccttatgggaatgggatgtctccagagataagggacttattgcttatggcttttaactgatggctgggggcgtgaaaagtgaaatcggatgagctgaccagtttgcccatccacgtcggggctgagtaaaagcatggttggcgaatgcctgggctgcagtagtagtcagcagtagctctgcaggaaccggggtgctgggcacgagccctcttcctccctccccagccgccagggggcgggcccggatcacaggagcggagcaggatagggacccaggctcacagaagtgtggagtggagcagagcagtggggggtcgggggtgaatatgggcacagagaggctctgggtctttctctggtcactcgaccttcctaggaggcctaaatgaaaaatggcttggagtcttagggttcagggggcgaaggtggctcccgagaaacaccagactggggtgagacggccggtataggccaccaacccagtgcagcccagtgtggcggcagcagccagagcagcggcgaacaggagcaggcaatgcgcctcggataggccaggcctagggaccctggcagggaacagcaggtgacggcggtgcatggggcctggccccaccagcgggcactggcccacagccacggccggggggccatctagatgggaaggtggatccgtggcccggggactggggacccccgtgacagctgcagctcctggggcctgcagcatctccatccgctcctgtagctgccgaacatgcgcctccaggtctcggttccggacctcggcctcctgtagttggctggagaagttctggttagcggtacggatggcctccagctcgcggctcaggctctgccgggtgagaacctcttcttccaaggcttcctggagctcccgcagcgtcaccatggtctctgtctcagccggagggacagggacagccgcggggtcagcctcttcagccgcttgatccggtggggacacggggggcggcaagtcaagcccttgcaagtctgacacaggcaactgcagggcctctagttccataggggtggggtccgtgacctgattgtctcttgaggccatgcaagagtaggagtaacccacaaaaggcaggtgcaccccgagtgccatgtcttcctgcatgtcggacagtgtctccccgcccccgctcaccatggcagtgagccggtcctccaccacatcaaaattgcatgtgtctgtggcaccctcgaagtctggtgtgaaggggggcacgctgtcccggagaccctcccaatcaaggccaaagaagaaaggatgcttctggaagtcacctgccccacctctaccgagccttatctcagcaggacacagcagcccacgaatgaggtcctgagcttcctcagggacacccatgtctgcccgaggcagagacaagtgttccctgtaatgcacaattttggcatacgtctcggctgtggagtcggcgtagaagggtgtctgcccatagaacatttcgtaggcaaacacgcccagtgcccaccagtcacactctggcccgtagctgcctgccccaggccctccaccaacagcctgcagaatctcaggagacaggtagtccggggtgcccacagccaccagcgacctcaccgttccatcaggctgcaatttgaggcaggagccaaaatctgccaggcgaatgtgcccacatcggtccagcagaatgttatctggtttgatgtccctgtgcacgtagcccagccggtgcaccgagtctatggccatgacaatctcggccaggtagaagcgcgccatctcggcggggatccgctccccaaacttgctcagcagcgttagcaggtccccgcccacgtagtattccatgaccaggtacaggtagttctcatcctggaaggcaaagtgcaactgtgtgatccagcgccggtcccctttcactaatacatccctttcttcccggaagcatgacacctcgcctctcttcagcatgtcccacttattcataatcttcatggcatacacttggccggtctgtttcatcttcaccaccgctacctcactgaacgccccacgcccgatcaccttcaaaatctcaaagtcatccctctgcagtcggacctccttaagccttgctgcaatgggctccacccattgcaaaaagtcggccacatacttgtcctgggctaggtgggaggcgcccagctcctggtggacgcccaggagaaggtcgagcaggggctccagccccaggaagcctgggtccagcaccagctgctggagctgcctcagccgcacttcggctgacatgttgggcaggcaacaccatggcccctccccgggccggagctcggggtcctcccgtcacggggcctggctgcccctgtccaggccccagaaccctggctgcatgtctgcctgtccctgactatcccctgggtctctct

SEQ ID NO: 371 - RNA, 2192 nt, Macaca fascicularis
  source 1..2192: mol_type = mRNA
agcccccagcccccagcgcccagcgcccagcccccagcccccagcgcccagcgcctagctctggagcttgtcaggagcaagggggtggttgctactgggtcactcagcctcgactggccccattttagtaatgggcaggttcctcttggaatccatcacacctgtggcttcctctgtgctctacctttttattggggtgacagtgtgagagctgagattctccatccatcccctctagcactgaagggttctgaagggccctggaaggagggagcttggggggtggcttgtgaggggttaaggctgggaggcgggaggggggctggaccaaggggtggggagaaggggaggaggcctcagcagcagagagaagtggccagagaggcccaggggacagtcagggacaggcagacatgcagccagggctccagggtctggacaggggctgccaggccccgtgacaggaggaccccgagcccccggcccggggaggggccatggtgctgcctgtccaacatgtcagccgaggtgcggctgaggcagctccagcagctggtgttggaccccggcttcctggggctggagcccctgctcgaccttctcctgggcgtccaccaggagctgggtgcctccgaactggcccaggacaagtacgtggccgacttcttgcagtgggcggagcccatcgtggtgaggcttaaggaggtccgactgcacagggacgacttcgagattctgaaggtgatcggacgcggggcgttcagtgaggtagcggtggtgaagatgaagcagacgggccaggtgtacgccatgaagatcatgaacaagtgggacatgctgaagaggggcgaggtgtcgtgcttccgtgaggagagggacgtgttggtgaatggggaccggcggtggatcacgcagctgcatttcgccttccaggatgagaactacctgtacctggtcatggagtattacgtgggtggggacctgctgacactgctgagcaagtttggggagcggattccggctgagatggcgcgcttctacctggcggagattgtcatggccatagattcggtgcaccggctcggctacgtgcacagggacatcaaacccgacaacatcctgctggaccgctgtggccacatccgcctggccgacttcggctcctgtctcaagctgcaggcagatggaacggtgcggtcactggtggctgtgggcaccccagactacctgtcccccgagatcctgcaggctgtgggcggtgggcctgggacaggcagctacgggccagagtgtgactggtgggcgctgggtgtgttcgcctatgaaatgttctacgggcagacgcccttctacgcggattccacggcggagacctacggcaagatcgtccactacaaggagcacctctctctgccgctggcagatgaaggggtccctgaggaggctcaagacctcatccagcgtctgctgtgtcccccggagacacggctgggccggggtggagcaggtgacttccggacacatcccttcttctttggcctcgactgggatggtctccgagacagcatgcccccctttacaccggatttcgaaggtgccaccgacacatgcaacttcgacttggtggaggacgggctcactgccatggtgagcgggggcggggagacgctgtcggacattcgggaaggtgcgccactgggggtccacctgccttttgtgggctactcctactcctgcatggccctcaggtaagcactgccctggatgacctccagaggccccgaggctgctggagcttcctgggtcctgctccttggcagccaatagagttgcaggatcagtcttggaaccttattgttttgggaccaaagactcctaagaggccagagttggaggaccttaaaatgtcagatacatgtacttcgaaatgttagattgaactttaaaacctcagttacagactgggctttccagaatctcgtaaccatcagctttaccgtctgtggtacacagagtcacaggacttcagaatcttggaaaatatgaagttgagacttttataatctaattgtaaaagaatgcaaactctttgaatcacccacataataataaggccatttaaaaatattaatttaggccaggtgcggtgactcacacctgtaatcccagcactttgggaggccgaggcgggt

SEQ ID NO: 372 - RNA, 2192 nt, Macaca fascicularis
  source 1..2192: mol_type = mRNA
acccgcctcggcctcccaaagtgctgggattacaggtgtgagtcaccgcacctggcctaaattaatatttttaaatggccttattattatgtgggtgattcaaagagtttgcattcttttacaattagattataaaagtctcaacttcatattttccaagattctgaagtcctgtgactctgtgtaccacagacggtaaagctgatggttacgagattctggaaagcccagtctgtaactgaggttttaaagttcaatctaacatttcgaagtacatgtatctgacattttaaggtcctccaactctggcctcttaggagtctttggtcccaaaacaataaggttccaagactgatcctgcaactctattggctgccaaggagcaggacccaggaagctccagcagcctcggggcctctggaggtcatccagggcagtgcttacctgagggccatgcaggagtaggagtagcccacaaaaggcaggtggacccccagtggcgcaccttcccgaatgtccgacagcgtctccccgcccccgctcaccatggcagtgagcccgtcctccaccaagtcgaagttgcatgtgtcggtggcaccttcgaaatccggtgtaaaggggggcatgctgtctcggagaccatcccagtcgaggccaaagaagaagggatgtgtccggaagtcacctgctccaccccggcccagccgtgtctccgggggacacagcagacgctggatgaggtcttgagcctcctcagggaccccttcatctgccagcggcagagagaggtgctccttgtagtggacgatcttgccgtaggtctccgccgtggaatccgcgtagaagggcgtctgcccgtagaacatttcataggcgaacacacccagcgcccaccagtcacactctggcccgtagctgcctgtcccaggcccaccgcccacagcctgcaggatctcgggggacaggtagtctggggtgcccacagccaccagtgaccgcaccgttccatctgcctgcagcttgagacaggagccgaagtcggccaggcggatgtggccacagcggtccagcaggatgttgtcgggtttgatgtccctgtgcacgtagccgagccggtgcaccgaatctatggccatgacaatctccgccaggtagaagcgcgccatctcagccggaatccgctccccaaacttgctcagcagtgtcagcaggtccccacccacgtaatactccatgaccaggtacaggtagttctcatcctggaaggcgaaatgcagctgcgtgatccaccgccggtccccattcaccaacacgtccctctcctcacggaagcacgacacctcgcccctcttcagcatgtcccacttgttcatgatcttcatggcgtacacctggcccgtctgcttcatcttcaccaccgctacctcactgaacgccccgcgtccgatcaccttcagaatctcgaagtcgtccctgtgcagtcggacctccttaagcctcaccacgatgggctccgcccactgcaagaagtcggccacgtacttgtcctgggccagttcggaggcacccagctcctggtggacgcccaggagaaggtcgagcaggggctccagccccaggaagccggggtccaacaccagctgctggagctgcctcagccgcacctcggctgacatgttggacaggcagcaccatggcccctccccgggccgggggctcggggtcctcctgtcacggggcctggcagcccctgtccagaccctggagccctggctgcatgtctgcctgtccctgactgtcccctgggcctctctggccacttctctctgctgctgaggcctcctccccttctccccaccccttggtccagcccccctcccgcctcccagccttaacccctcacaagccaccccccaagctccctccttccagggcccttcagaacccttcagtgctagaggggatggatggagaatctcagctctcacactgtcaccccaataaaaaggtagagcacagaggaagccacaggtgtgatggattccaagaggaacctgcccattactaaaatggggccagtcgaggctgagtgacccagtagcaaccacccccttgctcctgacaagctccagagctaggcgctgggcgctgggggctgggggctgggcgctgggcgctgggggctgggggct

SEQ ID NO: 373 - RNA, 3569 nt, Homo sapiens
  source 1..3569: mol_type = mRNA
agtgacgctgcggcctccttctgcctaggtcccaacgcttcggggcaggggtgcggtcttgcaataggaagccgagcgtcttgcaagcttcccgtcgggcaccagctactcggccccgcaccctacctggtgcattccctagacacctccggggtccctacctggagatccccggagccccccttcctgcgccagccatgcctttaaaccgcactttgtccatgtcctcactgccaggactggaggactgggaggatgaattcgacctggagaacgcagtgctcttcgaagtggcctgggaggtggctaacaaggtgggtggcatctacacggtgctgcagacgaaggcgaaggtgacaggggacgaatggggcgacaactacttcctggtggggccgtacacggagcagggcgtgaggacccaggtggaactgctggaggcccccaccccggccctgaagaggacactggattccatgaacagcaagggctgcaaggtgtatttcgggcgctggctgatcgagggaggccctctggtggtgctcctggacgtgggtgcctcagcttgggccctggagcgctggaagggagagctctgggatacctgcaacatcggagtgccgtggtacgaccgcgaggccaacgacgctgtcctctttggctttctgaccacctggttcctgggtgagttcctggcacagagtgaggagaagccacatgtggttgctcacttccatgagtggttggcaggcgttggactctgcctgtgtcgtgcccggcgactgcctgtagcaaccatcttcaccacccatgccacgctgctggggcgctacctgtgtgccggtgccgtggacttctacaacaacctggagaacttcaacgtggacaaggaagcaggggagaggcagatctaccaccgatactgcatggaaagggcggcagcccactgcgctcacgtcttcactactgtgtcccagatcaccgccatcgaggcacagcacttgctcaagaggaaaccagatattgtgacccccaatgggctgaatgtgaagaagttttctgccatgcatgagttccagaacctccatgctcagagcaaggctcgaatccaggagtttgtgcggggccatttttatgggcatctggacttcaacttggacaagaccttatacttctttatcgccggccgctatgagttctccaacaagggtgctgacgtcttcctggaggcattggctcggctcaactatctgctcagagtgaacggcagcgagcagacagtggttgccttcttcatcatgccagcgcggaccaacaatttcaacgtggaaaccctcaaaggccaagctgtgcgcaaacagctttgggacacggccaacacggtgaaggaaaagttcgggaggaagctttatgaatccttactggttgggagccttcccgacatgaacaagatgctggataaggaagacttcactatgatgaagagagccatctttgcaacgcagcggcagtctttcccccctgtgtgcacccacaatatgctggatgactcctcagaccccatcctgaccaccatccgccgaatcggcctcttcaatagcagtgccgacagggtgaaggtgattttccacccggagttcctctcctccacaagccccctgctccctgtggactatgaggagtttgtccgtggctgtcaccttggagtcttcccctcctactatgagccttggggctacacaccggctgagtgcacggttatgggaatccccagtatctccaccaatctctccggcttcggctgcttcatggaggaacacatcgcagacccctcagcttacggtatctacattcttgaccggcggttccgcagcctggatgattcctgctcgcagctcacctccttcctctacagtttctgtcagcagagccggcggcagcgtatcatccagcggaaccgcacggagcgcctctccgaccttctggactggaaatacctaggccggtactatatgtctgcgcgccacatggcgctgtccaaggcctttccagagcacttcacctacgagcccaacgaggcggatgcggcccaggggtaccgctacccacggccagcctcggtgccaccgtcgccctcgctgtcacgacactccagcccgcaccagagtgaggacgaggaggatccccggaacgggccgctggaggaagacggcgagcgctacgatgaggacgaggaggccgccaaggaccggcgcaacatccgtgcaccagagtggccgcgccgagcgtcctgcacctcctccaccagcggcagcaagcgcaactctgtggacacggccacctccagctcactcagcaccccgagcgagcccctcagccccaccagctccctgggcgaggagcgtaactaagtccgccccaccacactccccgcctgtcctgcctctctgctccagagagaggatgcagaggggtgctgctcctaaacccccgctccagatctgcactgggtgtggccccgcagtgcccccacccagtccgccaaacactccaccccctccagctccagtttccaagttcctgcactccagaatccacaaagccgtgcctttctctggctccagaatatgcataatcagcgccctggagtcccctgggcctggaccgcttcccagaggccaggaatctgccattactctgcggtggtgccagaggttttaggaaacctggcatggtgctttcaggtctggggcttttagagccccccgtgtggcttacaaattctacagcatacagagcaggccacgctcaggcccggcatgcgggccaccaagttctggaaaccacgtggtgtccctgcgaatggggcgatcaagtccagagccggggcactttcagagtttgaaggtaactgagagcagatggtcctccatttcaactccagaagtggggctctgggagggatgttctagccctccctggcatgtcagagccaggctctgcctggaggatccctccatccggctcctgtcatcccctacactttggccaagcaagaggtggtagaaccacttggctgctcattccttctggaggacacacagtctcagtccagatgccttcctgtctttctggccctttctggaccagatcctactcttcctttctaaatctgagatctccctccagggaatccgcctgcagaggacagagctggctgtcttcccccacccctaacctggcttattcccaactgctctgcccactgtgaaaccactaggttctaggtcctggcttctagatctggaaccttaccacgttactgcatactgatccctttcccatgatccagaactgaggtcactgggttctagaacccccacatttacctcgaggctcttccatccccaaactgtgccctgccttcagctttggtgaaagggagggcccctcatgtgtgctgtgctgtgtctgcaccgcttggtttgcagttgagaggggagggcaggaggggtgtgattggagtgtgtccggagatgagatgaaaaaaatacatctatatttaagaa

SEQ ID NO: 374 - RNA, 3569 nt, Homo sapiens
  source 1..3569: mol_type = mRNA
ttcttaaatatagatgtatttttttcatctcatctccggacacactccaatcacacccctcctgccctcccctctcaactgcaaaccaagcggtgcagacacagcacagcacacatgaggggccctccctttcaccaaagctgaaggcagggcacagtttggggatggaagagcctcgaggtaaatgtgggggttctagaacccagtgacctcagttctggatcatgggaaagggatcagtatgcagtaacgtggtaaggttccagatctagaagccaggacctagaacctagtggtttcacagtgggcagagcagttgggaataagccaggttaggggtgggggaagacagccagctctgtcctctgcaggcggattccctggagggagatctcagatttagaaaggaagagtaggatctggtccagaaagggccagaaagacaggaaggcatctggactgagactgtgtgtcctccagaaggaatgagcagccaagtggttctaccacctcttgcttggccaaagtgtaggggatgacaggagccggatggagggatcctccaggcagagcctggctctgacatgccagggagggctagaacatccctcccagagccccacttctggagttgaaatggaggaccatctgctctcagttaccttcaaactctgaaagtgccccggctctggacttgatcgccccattcgcagggacaccacgtggtttccagaacttggtggcccgcatgccgggcctgagcgtggcctgctctgtatgctgtagaatttgtaagccacacggggggctctaaaagccccagacctgaaagcaccatgccaggtttcctaaaacctctggcaccaccgcagagtaatggcagattcctggcctctgggaagcggtccaggcccaggggactccagggcgctgattatgcatattctggagccagagaaaggcacggctttgtggattctggagtgcaggaacttggaaactggagctggagggggtggagtgtttggcggactgggtgggggcactgcggggccacacccagtgcagatctggagcgggggtttaggagcagcacccctctgcatcctctctctggagcagagaggcaggacaggcggggagtgtggtggggcggacttagttacgctcctcgcccagggagctggtggggctgaggggctcgctcggggtgctgagtgagctggaggtggccgtgtccacagagttgcgcttgctgccgctggtggaggaggtgcaggacgctcggcgcggccactctggtgcacggatgttgcgccggtccttggcggcctcctcgtcctcatcgtagcgctcgccgtcttcctccagcggcccgttccggggatcctcctcgtcctcactctggtgcgggctggagtgtcgtgacagcgagggcgacggtggcaccgaggctggccgtgggtagcggtacccctgggccgcatccgcctcgttgggctcgtaggtgaagtgctctggaaaggccttggacagcgccatgtggcgcgcagacatatagtaccggcctaggtatttccagtccagaaggtcggagaggcgctccgtgcggttccgctggatgatacgctgccgccggctctgctgacagaaactgtagaggaaggaggtgagctgcgagcaggaatcatccaggctgcggaaccgccggtcaagaatgtagataccgtaagctgaggggtctgcgatgtgttcctccatgaagcagccgaagccggagagattggtggagatactggggattcccataaccgtgcactcagccggtgtgtagccccaaggctcatagtaggaggggaagactccaaggtgacagccacggacaaactcctcatagtccacagggagcagggggcttgtggaggagaggaactccgggtggaaaatcaccttcaccctgtcggcactgctattgaagaggccgattcggcggatggtggtcaggatggggtctgaggagtcatccagcatattgtgggtgcacacaggggggaaagactgccgctgcgttgcaaagatggctctcttcatcatagtgaagtcttccttatccagcatcttgttcatgtcgggaaggctcccaaccagtaaggattcataaagcttcctcccgaacttttccttcaccgtgttggccgtgtcccaaagctgtttgcgcacagcttggcctttgagggtttccacgttgaaattgttggtccgcgctggcatgatgaagaaggcaaccactgtctgctcgctgccgttcactctgagcagatagttgagccgagccaatgcctccaggaagacgtcagcacccttgttggagaactcatagcggccggcgataaagaagtataaggtcttgtccaagttgaagtccagatgcccataaaaatggccccgcacaaactcctggattcgagccttgctctgagcatggaggttctggaactcatgcatggcagaaaacttcttcacattcagcccattgggggtcacaatatctggtttcctcttgagcaagtgctgtgcctcgatggcggtgatctgggacacagtagtgaagacgtgagcgcagtgggctgccgccctttccatgcagtatcggtggtagatctgcctctcccctgcttccttgtccacgttgaagttctccaggttgttgtagaagtccacggcaccggcacacaggtagcgccccagcagcgtggcatgggtggtgaagatggttgctacaggcagtcgccgggcacgacacaggcagagtccaacgcctgccaaccactcatggaagtgagcaaccacatgtggcttctcctcactctgtgccaggaactcacccaggaaccaggtggtcagaaagccaaagaggacagcgtcgttggcctcgcggtcgtaccacggcactccgatgttgcaggtatcccagagctctcccttccagcgctccagggcccaagctgaggcacccacgtccaggagcaccaccagagggcctccctcgatcagccagcgcccgaaatacaccttgcagcccttgctgttcatggaatccagtgtcctcttcagggccggggtgggggcctccagcagttccacctgggtcctcacgccctgctccgtgtacggccccaccaggaagtagttgtcgccccattcgtcccctgtcaccttcgccttcgtctgcagcaccgtgtagatgccacccaccttgttagccacctcccaggccacttcgaagagcactgcgttctccaggtcgaattcatcctcccagtcctccagtcctggcagtgaggacatggacaaagtgcggtttaaaggcatggctggcgcaggaaggggggctccggggatctccaggtagggaccccggaggtgtctagggaatgcaccaggtagggtgcggggccgagtagctggtgcccgacgggaagcttgcaagacgctcggcttcctattgcaagaccgcacccctgccccgaagcgttgggacctaggcagaaggaggccgcagcgtcact

SEQ ID NO: 375 - RNA, 3681 nt, Mus musculus
  source 1..3681: mol_type = mRNA
actgcagctgcccgcccgattcagtgtctcagctcaccctacctgagtcggagcgctctggggcgggggtgcggtcgtgcaataggaagcggagcgccttgcaagcttcccctgggacacccgctaactctaccggtcaccaagtctgctgcgttcccagccgatctctctggtttccagttttggtgctcgaagtcccctgcccgcagtagccatgcctctcagccgcagtctctctgtgtcctcgcttccaggattggaagactgggaggatgaattcgaccccgagaacgcagtgcttttcgaggtggcctgggaggtggccaacaaggtgggtggcatctacactgtgctgcagacgaaggcgaaggtgacaggggatgaatggggtgacaactactatctggtgggaccatacacggagcagggtgtgaggacgcaggtagagctcctggagcccccaactccggaactgaagaggactttggattccatgaacagcaagggttgtaaggtgtattttgggcgttggctgatcgaggggggacccctagtggtgctcctggatgtaggagcctcagcttgggccctggagcgctggaagggtgagctttgggacacctgcaacatcggggtaccctggtacgaccgcgaggccaatgacgctgtcctgttcggcttcctcaccacctggttcctgggtgagttcctggcccagaacgaagagaagccgtatgtggttgcccacttccacgaatggttggctggcgttggtctgtgtctgtgccgtgcccggcgcttgccggtggcaaccatcttcaccactcatgccacgctgctggggcgctacctgtgtgctggcgctgtggacttctacaacaacctggagaatttcaatgtagacaaggaagcaggagagaggcagatctatcaccggtactgcatggagcgtgcagcagctcactgtgcccatgtcttcactaccgtatcccagatcaccgcaatcgaggctcaacacctccttaagagaaaaccagatattgtgacccccaacgggctgaatgtgaagaagttctctgctatgcacgaattccagaaccttcatgctcagagcaaagcacgaatccaggaatttgtgcgtggccatttttatgggcacctggacttcaacctagacaagactttgtatttctttatcgctggccgctatgagttttccaacaagggagctgatgtgttcctggaggcattggcccggctcaactatctgctcagagtgaatggcagtgagcaaacagttgtcgcattcttcatcatgccggcccggaccaataatttcaacgtggaaaccctgaagggccaagccgtgcgcaaacaactatgggacacagccaatacagtcaaggagaaatttgggaggaagctctacgaatcccttttagtggggagcctcccggacatgaacaagatgctggacaaggaggacttcactatgatgaagagagccatctttgccactcagcggcagtctttcccaccagtgtgcacccacaacatgctggacgactcctcagaccccatcttgaccaccatccgccgaattggccttttcaacagcagtgccgaccgtgtgaaggtgatttttcacccagaattcctttcttccacaagccctctcctccccgtggattatgaggaatttgtccgcggctgtcaccttggggtcttcccctcctactatgagccctggggctacacaccagcggagtgcactgtcatgggcatccccagcatctccaccaacctctccggctttggctgctttatggaggaacacatcgcagatccctcagcttacggcatttacattctggatcggaggttccgcagcctggatgattcatgctcacagctcacctccttcctgtacagcttctgccagcagagccggcgacagcgcatcatccagcggaaccgcacagaacggttgtcggacttgctagattggaagtacctgggccggtactacatgtctgcgcgccacatggctctggccaaggcctttccagaccacttcacctatgaaccccatgaggtagatgcgacccaggggtaccggtacccacgaccagcctccgtcccgccgtcgccctcactgtctcgacactccagcccacaccagagtgaggatgaggaagagccacgggatggacccctgggggaagacagtgagcgttatgatgaggaagaggaggctgccaaggaccgccgcaacatccgggcacctgagtggccacgcagggcctcctgttcctcctccacaggtggcagcaagagaagcaactcggtggacactgggccctccagctcactcagcacacccactgagcccctgagtcctaccagttccctgggtgaggagcgcaactaagctcccacccccatcccattccctgcctgtccagtgctcctctcgcagagggcctatgcagatgggagggtgcctgaaccccactccagactcttgagtgggacccctacccagtgtggtccatagcctaacctctgtttcagacactccagcccttgagctccaatcttggagttcccgcactccacgccgccgtgcctttcttggattgcaggatgcattctttgtgcactgatctggagtctccaggcttagactgggtcccagaggccaggcatctgccattgtttttcaatgccagaggttttaggacacctggtttattggcttccaggctgtggcttcttcgtttgatcctataatcatacagagtatgctttgctcaggcctgcctctgggaccacctcatgttggattctgtgtggcttcccgaatcagccaagttcagagttaggacatttcagggattaacataattgaaaatcagcctgcaaggtagctcagtagctctgtcgacagattgcttgtctagcatgcccgaagccctgggatctaactctagaacctcataaacctggtgcggtgatacacatctgtaatcccagcactcggtaggtagaggtagacggatcaagagttaaaggccatcatcctctgctacatagggagttcaaggccaaactgggcaacatgagacactgtctcaaaagcaaagtaaaggtggtggaatgctcacggtcctccatttcaacccacgactgcgatgctgggacatgctgcaaggttggcctccctgggtgtgttcttcaaaggagcatgcggagttggaccagacacctttctgccttttttctggaccagaccttcttttccttggtccagtgtcccctctagggaatgcctccattgagggcagaatgtctgtcaaccccacaagtgctcagcccactgtgaaaccactgggttctgggtcccagtggctgaatcaggagtcttttgtcactgtgctgcaccccggtcccctttcctgatacaaaaccgagcccaccggcttcttgaagccccacatgtacctcgaggcctttctgcctgcaagcttcagtgaatgggcgggcccctcctcacgtgtgctgtgtctggcccagtgcctttggtttgcatttgggagggggagggcagaaggtgtgtgattggagtgtgtctagagatgaaaaaaaaaaaaagaaaatacacctgtatttaagaatgcc

SEQ ID NO: 376 - RNA, 3681 nt, Mus musculus
  source 1..3681: mol_type = mRNA
ggcattcttaaatacaggtgtattttctttttttttttttcatctctagacacactccaatcacacaccttctgccctccccctcccaaatgcaaaccaaaggcactgggccagacacagcacacgtgaggaggggcccgcccattcactgaagcttgcaggcagaaaggcctcgaggtacatgtggggcttcaagaagccggtgggctcggttttgtatcaggaaaggggaccggggtgcagcacagtgacaaaagactcctgattcagccactgggacccagaacccagtggtttcacagtgggctgagcacttgtggggttgacagacattctgccctcaatggaggcattccctagaggggacactggaccaaggaaaagaaggtctggtccagaaaaaaggcagaaaggtgtctggtccaactccgcatgctcctttgaagaacacacccagggaggccaaccttgcagcatgtcccagcatcgcagtcgtgggttgaaatggaggaccgtgagcattccaccacctttactttgcttttgagacagtgtctcatgttgcccagtttggccttgaactccctatgtagcagaggatgatggcctttaactcttgatccgtctacctctacctaccgagtgctgggattacagatgtgtatcaccgcaccaggtttatgaggttctagagttagatcccagggcttcgggcatgctagacaagcaatctgtcgacagagctactgagctaccttgcaggctgattttcaattatgttaatccctgaaatgtcctaactctgaacttggctgattcgggaagccacacagaatccaacatgaggtggtcccagaggcaggcctgagcaaagcatactctgtatgattataggatcaaacgaagaagccacagcctggaagccaataaaccaggtgtcctaaaacctctggcattgaaaaacaatggcagatgcctggcctctgggacccagtctaagcctggagactccagatcagtgcacaaagaatgcatcctgcaatccaagaaaggcacggcggcgtggagtgcgggaactccaagattggagctcaagggctggagtgtctgaaacagaggttaggctatggaccacactgggtaggggtcccactcaagagtctggagtggggttcaggcaccctcccatctgcataggccctctgcgagaggagcactggacaggcagggaatgggatgggggtgggagcttagttgcgctcctcacccagggaactggtaggactcaggggctcagtgggtgtgctgagtgagctggagggcccagtgtccaccgagttgcttctcttgctgccacctgtggaggaggaacaggaggccctgcgtggccactcaggtgcccggatgttgcggcggtccttggcagcctcctcttcctcatcataacgctcactgtcttcccccaggggtccatcccgtggctcttcctcatcctcactctggtgtgggctggagtgtcgagacagtgagggcgacggcgggacggaggctggtcgtgggtaccggtacccctgggtcgcatctacctcatggggttcataggtgaagtggtctggaaaggccttggccagagccatgtggcgcgcagacatgtagtaccggcccaggtacttccaatctagcaagtccgacaaccgttctgtgcggttccgctggatgatgcgctgtcgccggctctgctggcagaagctgtacaggaaggaggtgagctgtgagcatgaatcatccaggctgcggaacctccgatccagaatgtaaatgccgtaagctgagggatctgcgatgtgttcctccataaagcagccaaagccggagaggttggtggagatgctggggatgcccatgacagtgcactccgctggtgtgtagccccagggctcatagtaggaggggaagaccccaaggtgacagccgcggacaaattcctcataatccacggggaggagagggcttgtggaagaaaggaattctgggtgaaaaatcaccttcacacggtcggcactgctgttgaaaaggccaattcggcggatggtggtcaagatggggtctgaggagtcgtccagcatgttgtgggtgcacactggtgggaaagactgccgctgagtggcaaagatggctctcttcatcatagtgaagtcctccttgtccagcatcttgttcatgtccgggaggctccccactaaaagggattcgtagagcttcctcccaaatttctccttgactgtattggctgtgtcccatagttgtttgcgcacggcttggcccttcagggtttccacgttgaaattattggtccgggccggcatgatgaagaatgcgacaactgtttgctcactgccattcactctgagcagatagttgagccgggccaatgcctccaggaacacatcagctcccttgttggaaaactcatagcggccagcgataaagaaatacaaagtcttgtctaggttgaagtccaggtgcccataaaaatggccacgcacaaattcctggattcgtgctttgctctgagcatgaaggttctggaattcgtgcatagcagagaacttcttcacattcagcccgttgggggtcacaatatctggttttctcttaaggaggtgttgagcctcgattgcggtgatctgggatacggtagtgaagacatgggcacagtgagctgctgcacgctccatgcagtaccggtgatagatctgcctctctcctgcttccttgtctacattgaaattctccaggttgttgtagaagtccacagcgccagcacacaggtagcgccccagcagcgtggcatgagtggtgaagatggttgccaccggcaagcgccgggcacggcacagacacagaccaacgccagccaaccattcgtggaagtgggcaaccacatacggcttctcttcgttctgggccaggaactcacccaggaaccaggtggtgaggaagccgaacaggacagcgtcattggcctcgcggtcgtaccagggtaccccgatgttgcaggtgtcccaaagctcacccttccagcgctccagggcccaagctgaggctcctacatccaggagcaccactaggggtcccccctcgatcagccaacgcccaaaatacaccttacaacccttgctgttcatggaatccaaagtcctcttcagttccggagttgggggctccaggagctctacctgcgtcctcacaccctgctccgtgtatggtcccaccagatagtagttgtcaccccattcatcccctgtcaccttcgccttcgtctgcagcacagtgtagatgccacccaccttgttggccacctcccaggccacctcgaaaagcactgcgttctcggggtcgaattcatcctcccagtcttccaatcctggaagcgaggacacagagagactgcggctgagaggcatggctactgcgggcaggggacttcgagcaccaaaactggaaaccagagagatcggctgggaacgcagcagacttggtgaccggtagagttagcgggtgtcccaggggaagcttgcaaggcgctccgcttcctattgcacgaccgcacccccgccccagagcgctccgactcaggtagggtgagctgagacactgaatcgggcgggcagctgcagt

SEQ ID NO: 377 - RNA, 3691 nt, Rattus norvegicus
  source 1..3691: mol_type = mRNA
cactgcagctgccctcccgattcagtgtcgccgctcaccctacctgagtcggagtgctctggggcgggggtgcggtcgtgcaataggaagcagagcgccttgcaagcttcccgtaggacacccgttaacccgaccggtcaccaagtctggtgcattcccagccgacctctcgggtttccatttttggtgctcgaagtcccctgcccgcagtagccatgcctctcagccgcagtctctctatgtcctcgcttccaggattggaagactgggaggatgaattcgacccggagaacgcagtgcttttcgaggtggcctgggaggtggccaacaaggtgggtggcatctacactgtgctgcagacgaaggcgaaggtgaccggggatgaatggggtgacaactactatctggtgggaccatacacggagcagggtgtgaggacgcaggtggagctcctggagcccccaactcctgaactgaagaggactctggattccatgaacagcaagggctgtaaggtgtattttgggcgttggctgatcgaggggggacccctagtggtgctcctggatgtaggggcctcagcctgggccctggagcgctggaagggtgaactttgggacacctgcaacatcggggtaccctggtacgaccgtgaggccaatgatgccgtcctgtttggtttcctcaccacctggttcctgggtgagttcctggcccagaatgaagagaagccatatgtggtcgcccacttccatgaatggttggcaggcgttggtctgtgtctgtgccgagcccggcgtttgccggtggcaaccatcttcaccactcacgccacgctgctgggtcgctacctatgtgctggtgccgtggacttctacaacaacctggagaatttcaatgtagacaaggaagcaggcgagaggcagatctatcaccggtactgcatggagcgggcagcagcccactgtgcccatgtcttcactacagtgtcccagatcaccgcgattgaggctcaacacctcctcaagaggaaaccagatattgtgacccccaatggactaaatgtgaagaagttctctgctatgcacgaattccagaaccttcacgctcagagcaaagcacgaatccaggagtttgtgcgtggccatttttatgggcacctggacttcaacctagacaagactttgtatttctttatcgctggacgctatgagttttccaacaagggagctgatatattcctggaggcattggcccggctcaactacctgctcagagtgaatggcagcgagcaaactgttgtggcattcttcatcatgccggctcggaccaacaacttcaacgtggaaaccctgaagggccaagccgtgcgcaaacagctatgggacacagccaatacagtcaaggagaaatttgggaggaagctctacgaatccctattagtgggtagcctccccgacatgaacaagatgctggacaaggaggacttcactatgatgaagagagccatctttgcgactcagcggcagtctttcccaccggtgtgtacccacaacatgctggatgactcttcagaccccatcttgaccaccatccgacgaatcggccttttcaacagtagtgcggaccgtgtgaaggtgatttttcacccagaattcctttcttccacaagccctctgctccccgtggactatgaagagttcgtccgtggctgtcaccttggagtcttcccctcctactatgagccctggggctacacaccagcggagtgcactgtcatgggcatcccgagcatctccacgaacctctccggctttggctgctttatggaggagcacattgcagatccctcggcttacggcatttacattctggatcggaggttccgaagcctggatgattcatgctcccaactcacctccttcctgtacagcttctgtcagcagagccggcgacagcgcatcattcagcggaatcgcacagagcgattgtcagacctgctggattggaagtacctaggccggtactacatgtctgcgcgccacatggctctggccaaggcctttccagaccacttcacctatgagccccatgaggtagatgcgacccaggggtaccgttacccacggccggcctccgtgccaccgtcaccctcactgtctcgacactccagcccacaccagagtgaggatgaagaagagccacgggatggacccctgagggaagacagtgagcgttatgatgaggaagaagaggctgccaaggaccgccgcaacatccgggcacccgagtggccacgccgggcctcctgctcctcctccacaggcggcagcaagagaagcaactcagtggacactgggccctccagctcactcagtacacccactgagcccctgagtcctaccagttccctgggcgaggagcgcaactaaggccccacccccatcccaaccccattccctgcctgttccgtgcccctctcgcagagggcctatgcagatgggagggtgcctgaaccccactccagaccctgagtggaacccttacccagtgtggtccatagcccaacctctgtttcagacactccagccctccggctccagtcttggagttcccacactccacgccaccgtgcctttcttggatcgcagaactcattctttatgcactgacctggagtctccgggcttagactgggtcccagaggccagagatctgcctttgttcttcagaggttttaggacacctggtttattggtttccaggctgctgcttctttcgtttgatcctatagtcatacagagtatgctatgctcaggcctgcccccctgggaccacctcatgttagattctgtgtggcttccctacagctgaaacagccaagttcagagttaggacatttcagggattaacataatcgaataccagcttcgaggtagtcaggtggcaggttgcttacctagaatgctggaatccctggatctagttctacgacctcataaacctggtgtggtgatccacatctgtaaccccagcactcagtaggtagcggtataaggatcaggcgttaatggtcatcctctgctacgtagcgagttcaaggccaagggggacaacatgagacactgtctcgaaagcaaaggtagccgattgctatggttctccatttcaacccagtctgagatgccagacatgctgtaaagttggcctccctggacatgtcccgttcatttcttcaaggagcatgtggagttgaaccagacacctttctgccttattctggaccagaacttatcttttccttggtccagtgtccccactagggagtgcctctattgagggcagaatgtcggtcaaccccgcaactgcttggcccactgtgaaaccactgggttctgggtcctgggtcctggtgactgaaatcaggagtcttgtcactgtgctgcaccctggtcctcttttcctgatacaaaagtgagcccaccggcttcttgaagccccacgtgtacctcgaggcctctctgcctgcaagctttgtcctgcccccagcttcagtgaatgggcaggcccctcctcacgcatgctgtgtctggcccaatgcctttggattgcatttgggagtgggagggcagaaggtgtgtgattggagtgtgttcagagatgaaaaaatacagctgtatttaagactgcc

SEQ ID NO: 378 - RNA, 3691 nt, Rattus norvegicus
  source 1..3691: mol_type = mRNA
ggcagtcttaaatacagctgtattttttcatctctgaacacactccaatcacacaccttctgccctcccactcccaaatgcaatccaaaggcattgggccagacacagcatgcgtgaggaggggcctgcccattcactgaagctgggggcaggacaaagcttgcaggcagagaggcctcgaggtacacgtggggcttcaagaagccggtgggctcacttttgtatcaggaaaagaggaccagggtgcagcacagtgacaagactcctgatttcagtcaccaggacccaggacccagaacccagtggtttcacagtgggccaagcagttgcggggttgaccgacattctgccctcaatagaggcactccctagtggggacactggaccaaggaaaagataagttctggtccagaataaggcagaaaggtgtctggttcaactccacatgctccttgaagaaatgaacgggacatgtccagggaggccaactttacagcatgtctggcatctcagactgggttgaaatggagaaccatagcaatcggctacctttgctttcgagacagtgtctcatgttgtcccccttggccttgaactcgctacgtagcagaggatgaccattaacgcctgatccttataccgctacctactgagtgctggggttacagatgtggatcaccacaccaggtttatgaggtcgtagaactagatccagggattccagcattctaggtaagcaacctgccacctgactacctcgaagctggtattcgattatgttaatccctgaaatgtcctaactctgaacttggctgtttcagctgtagggaagccacacagaatctaacatgaggtggtcccaggggggcaggcctgagcatagcatactctgtatgactataggatcaaacgaaagaagcagcagcctggaaaccaataaaccaggtgtcctaaaacctctgaagaacaaaggcagatctctggcctctgggacccagtctaagcccggagactccaggtcagtgcataaagaatgagttctgcgatccaagaaaggcacggtggcgtggagtgtgggaactccaagactggagccggagggctggagtgtctgaaacagaggttgggctatggaccacactgggtaagggttccactcagggtctggagtggggttcaggcaccctcccatctgcataggccctctgcgagaggggcacggaacaggcagggaatggggttgggatgggggtggggccttagttgcgctcctcgcccagggaactggtaggactcaggggctcagtgggtgtactgagtgagctggagggcccagtgtccactgagttgcttctcttgctgccgcctgtggaggaggagcaggaggcccggcgtggccactcgggtgcccggatgttgcggcggtccttggcagcctcttcttcctcatcataacgctcactgtcttccctcaggggtccatcccgtggctcttcttcatcctcactctggtgtgggctggagtgtcgagacagtgagggtgacggtggcacggaggccggccgtgggtaacggtacccctgggtcgcatctacctcatggggctcataggtgaagtggtctggaaaggccttggccagagccatgtggcgcgcagacatgtagtaccggcctaggtacttccaatccagcaggtctgacaatcgctctgtgcgattccgctgaatgatgcgctgtcgccggctctgctgacagaagctgtacaggaaggaggtgagttgggagcatgaatcatccaggcttcggaacctccgatccagaatgtaaatgccgtaagccgagggatctgcaatgtgctcctccataaagcagccaaagccggagaggttcgtggagatgctcgggatgcccatgacagtgcactccgctggtgtgtagccccagggctcatagtaggaggggaagactccaaggtgacagccacggacgaactcttcatagtccacggggagcagagggcttgtggaagaaaggaattctgggtgaaaaatcaccttcacacggtccgcactactgttgaaaaggccgattcgtcggatggtggtcaagatggggtctgaagagtcatccagcatgttgtgggtacacaccggtgggaaagactgccgctgagtcgcaaagatggctctcttcatcatagtgaagtcctccttgtccagcatcttgttcatgtcggggaggctacccactaatagggattcgtagagcttcctcccaaatttctccttgactgtattggctgtgtcccatagctgtttgcgcacggcttggcccttcagggtttccacgttgaagttgttggtccgagccggcatgatgaagaatgccacaacagtttgctcgctgccattcactctgagcaggtagttgagccgggccaatgcctccaggaatatatcagctcccttgttggaaaactcatagcgtccagcgataaagaaatacaaagtcttgtctaggttgaagtccaggtgcccataaaaatggccacgcacaaactcctggattcgtgctttgctctgagcgtgaaggttctggaattcgtgcatagcagagaacttcttcacatttagtccattgggggtcacaatatctggtttcctcttgaggaggtgttgagcctcaatcgcggtgatctgggacactgtagtgaagacatgggcacagtgggctgctgcccgctccatgcagtaccggtgatagatctgcctctcgcctgcttccttgtctacattgaaattctccaggttgttgtagaagtccacggcaccagcacataggtagcgacccagcagcgtggcgtgagtggtgaagatggttgccaccggcaaacgccgggctcggcacagacacagaccaacgcctgccaaccattcatggaagtgggcgaccacatatggcttctcttcattctgggccaggaactcacccaggaaccaggtggtgaggaaaccaaacaggacggcatcattggcctcacggtcgtaccagggtaccccgatgttgcaggtgtcccaaagttcacccttccagcgctccagggcccaggctgaggcccctacatccaggagcaccactaggggtcccccctcgatcagccaacgcccaaaatacaccttacagcccttgctgttcatggaatccagagtcctcttcagttcaggagttgggggctccaggagctccacctgcgtcctcacaccctgctccgtgtatggtcccaccagatagtagttgtcaccccattcatccccggtcaccttcgccttcgtctgcagcacagtgtagatgccacccaccttgttggccacctcccaggccacctcgaaaagcactgcgttctccgggtcgaattcatcctcccagtcttccaatcctggaagcgaggacatagagagactgcggctgagaggcatggctactgcgggcaggggacttcgagcaccaaaaatggaaacccgagaggtcggctgggaatgcaccagacttggtgaccggtcgggttaacgggtgtcctacgggaagcttgcaaggcgctctgcttcctattgcacgaccgcacccccgccccagagcactccgactcaggtagggtgagcggcgacactgaatcgggagggcagctgcagtg

SEQ ID NO: 379 - RNA, 3421 nt, Macaca fascicularis
  source 1..3421: mol_type = mRNA
tccctaccttgaggtccccggagcccccttcctgcgccagccatgcctttaaaccgcactttgtccatgtcctcactgccaggactggaggactgggaggatgaattcgacctggagaacacagtgctcttcgaagtggcctgggaggtggccaacaaggtgggtggcatctacacggtgctgcagacgaaggcgaaggtgacgggggacgaatggggcgacaactactacctggtggggccgtacacggagcagggcgtgaggacccaggtggaactgctggaggcccccaccccggccctgaagaagacactggattccatgaacagcaagggttgcaaggtgtattttgggcgctggttgatcgagggaggccctctggtggtgctcctggatgtgggggcctcagcctgggccctggagcgctggaagggagagctctgggatacctgcaacatcggagtgccgtggtacgaccgcgaggccaacgatgctgtcctctttggctttctcactacctggttcctgggtgagttcctcgcgcagagtgaggagaagccacacgtggttgctcacttccatgagtggttggcaggcattggactctgcctgtgtcgtgcccggcgactgcctgtagcaaccatcttcaccacccatgccacgctgctggggcgctacctgtgtgccggtgctgtggacttctacaacaacctggagaacttcaacgtggacaaggaagcaggggagaggcagatctatcaccgctactgcatggaaagggcggcagcccactgtgctcacgtcttcactactgtgtcccagatcaccgccatcgaggcacagcacttgctcaagaggaaaccagatattgtgacccccaatgggctgaatgtgaagaagttttctgccatgcatgagttccagaacctccatgctcagagcaaggctcgaatccaggagtttgtgcggggccatttttatgggcatctggacttcaacttggacaagaccttgtacttctttatcgccggccgctatgagttctccaacaagggtgccgatgtcttcctggaggccttggcccggctcaactatctgctcagagtgaatggcagcgagcagacagtggttgccttcttcatcatgccggcgcggaccaacaatttcaacgtggaaaccctcaaaggccaagccgtgcgcaaacagctttgggacacggccaacacggtgaaggagaagttcgggaggaagctttatgaatccttactggttgggagccttcctgacatgaacaagatgctggataaggaagacttcactatgatgaagagagccatctttgcaacgcagcggcagtctttcccccctgtgtgcacccacaatatgctggatgactcctcagaccccatcctgaccaccatccgccgaatcggcctcttcaatagcagtgccgacagggtgaaggtgattttccacccggagttcctctcctccacaagccccctgctcccggtggactatgaggagtttgtccgtggctgtcaccttggggtcttcccatcctactatgagccttggggctatacgccggctgagtgcacggttatgggcatccccagtatctccaccaatctctccggcttcggctgcttcatggaggaacacatcgcagacccctcagcttacggtatctacattctcgaccggcggttccgcagcctggatgattcctgctcgcagctcacctccttcctctacagcttctgtcagcagagccggcggcagcgtatcatccagcggaaccgcacggagcgcctctccgaccttctggactggaaatacctaggccggtactatatgtctgcgcgccacatggcgctgtccaaggcctttccagagcacttcacctacgagcccagcgaggcagatgcggcccaagggtaccgctacccacggccggcctcggtgccaccgtcgccctcgctgtcacgacactccagcccgcaccagagcgaggacgaggaggatccccggaacgggcctctggaggaagacagcgagcgctacgatgaggacgaggaggccgccaaggaccggcgcaacattcgtgcaccagagtggccgcgccgagcgtcctgcacctcctccaccagtgggagcaagcgcaactctgtggacacggccacctccagctcgctcagcacccccagcgagcccctcagccccaccagctccctgggcgaggagcgtaactaagtcccccccaccacactccccgcctgtcctgcctccctgctccagagagaggatgcagaggggggctgctcctaaacccctgctccagatccgcactgggtgtggccccgcagtgccccccctcagtccgccaaacactccagcccctccagctccactttccaagttcctgcactccagaatccacaaagccgtgcctttctctgattccagagtgcataatccgcgccctggaatcccctgggcctggaccgcttcccagaggccaggaatctgccgttactctgcggtggtgccagaggttttaggaaacctggcatggtgctttcaggtctggggctcctagagtccctgtgaggcttacaaattctacagcacacagagcaggccacgcttgggccgggcatgcgggccaccaagtgctggaaaccacatggtgtccctgcgaatggggcaatcaagtccagagccggggcacttttcagagtttgaaggtaactgagagcagatggtcctccatttcaactccagaactggggctctgggatgggctcatattctagccctccccggcatgtcagagccaggctctgcctggaggatccctccatccggctcctgtcatcccctacgctttggccaagccagaggtggcagaaccacttggccgctcattccttctggaggacacacagtctcggtccagatgccttcctgcctttctggccttttctggaccagatcctactcctcctttctttatctgagatctccctccagggaatctgcctgcagaggacagagctggctgtctacccccacccctaacctggcttattcccaaccgctcagcccactgtgaaaccactaggttctaggtcctggcttctagatctggaaccttaccacattgctgcatactagtccctttcccatgatccggaactgaggtcactgggttctagaacccccacatttacctcgaggctcttccatccccaaactgtgccctgccttcagctttggtgaaaaggagggaccctcatgtgtgctgtgctgtgtctgcaccgcttggtttgcagttgggaggggagggcaggaggggtgtgattggagtgtgtccggagatgagatgaaaaaaatacacctatatttaagaatccca

SEQ ID NO: 380 - RNA, 3421 nt, Macaca fascicularis
  source 1..3421: mol_type = mRNA
tgggattcttaaatataggtgtatttttttcatctcatctccggacacactccaatcacacccctcctgccctcccctcccaactgcaaaccaagcggtgcagacacagcacagcacacatgagggtccctccttttcaccaaagctgaaggcagggcacagtttggggatggaagagcctcgaggtaaatgtgggggttctagaacccagtgacctcagttccggatcatgggaaagggactagtatgcagcaatgtggtaaggttccagatctagaagccaggacctagaacctagtggtttcacagtgggctgagcggttgggaataagccaggttaggggtgggggtagacagccagctctgtcctctgcaggcagattccctggagggagatctcagataaagaaaggaggagtaggatctggtccagaaaaggccagaaaggcaggaaggcatctggaccgagactgtgtgtcctccagaaggaatgagcggccaagtggttctgccacctctggcttggccaaagcgtaggggatgacaggagccggatggagggatcctccaggcagagcctggctctgacatgccggggagggctagaatatgagcccatcccagagccccagttctggagttgaaatggaggaccatctgctctcagttaccttcaaactctgaaaagtgccccggctctggacttgattgccccattcgcagggacaccatgtggtttccagcacttggtggcccgcatgcccggcccaagcgtggcctgctctgtgtgctgtagaatttgtaagcctcacagggactctaggagccccagacctgaaagcaccatgccaggtttcctaaaacctctggcaccaccgcagagtaacggcagattcctggcctctgggaagcggtccaggcccaggggattccagggcgcggattatgcactctggaatcagagaaaggcacggctttgtggattctggagtgcaggaacttggaaagtggagctggaggggctggagtgtttggcggactgagggggggcactgcggggccacacccagtgcggatctggagcaggggtttaggagcagcccccctctgcatcctctctctggagcagggaggcaggacaggcggggagtgtggtgggggggacttagttacgctcctcgcccagggagctggtggggctgaggggctcgctgggggtgctgagcgagctggaggtggccgtgtccacagagttgcgcttgctcccactggtggaggaggtgcaggacgctcggcgcggccactctggtgcacgaatgttgcgccggtccttggcggcctcctcgtcctcatcgtagcgctcgctgtcttcctccagaggcccgttccggggatcctcctcgtcctcgctctggtgcgggctggagtgtcgtgacagcgagggcgacggtggcaccgaggccggccgtgggtagcggtacccttgggccgcatctgcctcgctgggctcgtaggtgaagtgctctggaaaggccttggacagcgccatgtggcgcgcagacatatagtaccggcctaggtatttccagtccagaaggtcggagaggcgctccgtgcggttccgctggatgatacgctgccgccggctctgctgacagaagctgtagaggaaggaggtgagctgcgagcaggaatcatccaggctgcggaaccgccggtcgagaatgtagataccgtaagctgaggggtctgcgatgtgttcctccatgaagcagccgaagccggagagattggtggagatactggggatgcccataaccgtgcactcagccggcgtatagccccaaggctcatagtaggatgggaagaccccaaggtgacagccacggacaaactcctcatagtccaccgggagcagggggcttgtggaggagaggaactccgggtggaaaatcaccttcaccctgtcggcactgctattgaagaggccgattcggcggatggtggtcaggatggggtctgaggagtcatccagcatattgtgggtgcacacaggggggaaagactgccgctgcgttgcaaagatggctctcttcatcatagtgaagtcttccttatccagcatcttgttcatgtcaggaaggctcccaaccagtaaggattcataaagcttcctcccgaacttctccttcaccgtgttggccgtgtcccaaagctgtttgcgcacggcttggcctttgagggtttccacgttgaaattgttggtccgcgccggcatgatgaagaaggcaaccactgtctgctcgctgccattcactctgagcagatagttgagccgggccaaggcctccaggaagacatcggcacccttgttggagaactcatagcggccggcgataaagaagtacaaggtcttgtccaagttgaagtccagatgcccataaaaatggccccgcacaaactcctggattcgagccttgctctgagcatggaggttctggaactcatgcatggcagaaaacttcttcacattcagcccattgggggtcacaatatctggtttcctcttgagcaagtgctgtgcctcgatggcggtgatctgggacacagtagtgaagacgtgagcacagtgggctgccgccctttccatgcagtagcggtgatagatctgcctctcccctgcttccttgtccacgttgaagttctccaggttgttgtagaagtccacagcaccggcacacaggtagcgccccagcagcgtggcatgggtggtgaagatggttgctacaggcagtcgccgggcacgacacaggcagagtccaatgcctgccaaccactcatggaagtgagcaaccacgtgtggcttctcctcactctgcgcgaggaactcacccaggaaccaggtagtgagaaagccaaagaggacagcatcgttggcctcgcggtcgtaccacggcactccgatgttgcaggtatcccagagctctcccttccagcgctccagggcccaggctgaggcccccacatccaggagcaccaccagagggcctccctcgatcaaccagcgcccaaaatacaccttgcaacccttgctgttcatggaatccagtgtcttcttcagggccggggtgggggcctccagcagttccacctgggtcctcacgccctgctccgtgtacggccccaccaggtagtagttgtcgccccattcgtcccccgtcaccttcgccttcgtctgcagcaccgtgtagatgccacccaccttgttggccacctcccaggccacttcgaagagcactgtgttctccaggtcgaattcatcctcccagtcctccagtcctggcagtgaggacatggacaaagtgcggtttaaaggcatggctggcgcaggaagggggctccggggacctcaaggtaggga

SEQ ID NO: 381 - RNA, 1571 nt, Homo sapiens
  source 1..1571: mol_type = mRNA
ccacaaatgtgggagggcgataaccactcgtagaaagcgtgagaagttactacaagcggtcctcccggccaccgtactgttccgctcccagaagccccgggcggcggaagtcgtcactcttaagaagggacggggccccacgctgcgcacccgcgggtttgctatggcgatgagcagcggcggcagtggtggcggcgtcccggagcaggaggattccgtgctgttccggcgcggcacaggccagagcgatgattctgacatttgggatgatacagcactgataaaagcatatgataaagctgtggcttcatttaagcatgctctaaagaatggtgacatttgtgaaacttcgggtaaaccaaaaaccacacctaaaagaaaacctgctaagaagaataaaagccaaaagaagaatactgcagcttccttacaacagtggaaagttggggacaaatgttctgccatttggtcagaagacggttgcatttacccagctaccattgcttcaattgattttaagagagaaacctgtgttgtggtttacactggatatggaaatagagaggagcaaaatctgtccgatctactttccccaatctgtgaagtagctaataatatagaacaaaatgctcaagagaatgaaaatgaaagccaagtttcaacagatgaaagtgagaactccaggtctcctggaaataaatcagataacatcaagcccaaatctgctccatggaactcttttctccctccaccaccccccatgccagggccaagactgggaccaggaaagccaggtctaaaattcaatggcccaccaccgccaccgccaccaccaccaccccacttactatcatgctggctgcctccatttccttctggaccaccaataattcccccaccacctcccatatgtccagattctcttgatgatgctgatgctttgggaagtatgttaatttcatggtacatgagtggctatcatactggctattatatggaaatgctggcatagagcagcactaaatgacaccactaaagaaacgatcagacagatctggaatgtgaagcgttatagaagataactggcctcatttcttcaaaatatcaagtgttgggaaagaaaaaaggaagtggaatgggtaactcttcttgattaaaagttatgtaataaccaaatgcaatgtgaaatattttactggactctattttgaaaaaccatctgtaaaagactggggtgggggtgggaggccagcacggtggtgaggcagttgagaaaatttgaatgtggattagattttgaatgatattggataattattggtaattttatgagctgtgagaagggtgttgtagtttataaaagactgtcttaatttgcatacttaagcatttaggaatgaagtgttagagtgtcttaaaatgtttcaaatggtttaacaaaatgtatgtgaggcgtatgtggcaaaatgttacagaatctaactggtggacatggctgttcattgtactgtttttttctatcttctatatgtttaaaagtatataataaaaatatttaatttttttttaaa

SEQ ID NO: 382 - RNA, 1571 nt, Homo sapiens
  source 1..1571: mol_type = mRNA
tttaaaaaaaaattaaatatttttattatatacttttaaacatatagaagatagaaaaaaacagtacaatgaacagccatgtccaccagttagattctgtaacattttgccacatacgcctcacatacattttgttaaaccatttgaaacattttaagacactctaacacttcattcctaaatgcttaagtatgcaaattaagacagtcttttataaactacaacacccttctcacagctcataaaattaccaataattatccaatatcattcaaaatctaatccacattcaaattttctcaactgcctcaccaccgtgctggcctcccacccccaccccagtcttttacagatggtttttcaaaatagagtccagtaaaatatttcacattgcatttggttattacataacttttaatcaagaagagttacccattccacttccttttttctttcccaacacttgatattttgaagaaatgaggccagttatcttctataacgcttcacattccagatctgtctgatcgtttctttagtggtgtcatttagtgctgctctatgccagcatttccatataatagccagtatgatagccactcatgtaccatgaaattaacatacttcccaaagcatcagcatcatcaagagaatctggacatatgggaggtggtgggggaattattggtggtccagaaggaaatggaggcagccagcatgatagtaagtggggtggtggtggtggcggtggcggtggtgggccattgaattttagacctggctttcctggtcccagtcttggccctggcatggggggtggtggagggagaaaagagttccatggagcagatttgggcttgatgttatctgatttatttccaggagacctggagttctcactttcatctgttgaaacttggctttcattttcattctcttgagcattttgttctatattattagctacttcacagattggggaaagtagatcggacagattttgctcctctctatttccatatccagtgtaaaccacaacacaggtttctctcttaaaatcaattgaagcaatggtagctgggtaaatgcaaccgtcttctgaccaaatggcagaacatttgtccccaactttccactgttgtaaggaagctgcagtattcttcttttggcttttattcttcttagcaggttttcttttaggtgtggtttttggtttacccgaagtttcacaaatgtcaccattctttagagcatgcttaaatgaagccacagctttatcatatgcttttatcagtgctgtatcatcccaaatgtcagaatcatcgctctggcctgtgccgcgccggaacagcacggaatcctcctgctccgggacgccgccaccactgccgccgctgctcatcgccatagcaaacccgcgggtgcgcagcgtggggccccgtcccttcttaagagtgacgacttccgccgcccggggcttctgggagcggaacagtacggtggccgggaggaccgcttgtagtaacttctcacgctttctacgagtggttatcgccctcccacatttgtgg

SEQ ID NO: 383 - RNA, 1227 nt, Mus musculus
  source 1..1227: mol_type = mRNA
gtcattgagtgagcccggcagcgtccgtggtagcaggccatggcgatgggcagtggcggagcgggctccgagcaggaagatacggtgctgttccggcgtggcaccggccagagtgatgattctgacatttgggatgatacagcattgataaaagcttatgataaagctgtggcttcctttaagcatgctctaaagaacggtgacatttgtgaaactccagataagccaaaaggcacagccagaagaaaacctgccaagaagaataaaagccaaaagaagaatgccacaactcccttgaaacagtggaaagttggtgacaagtgttctgctgtttggtcagaagacggctgcatttacccagctactattacgtccattgactttaagagagaaacctgtgtcgtggtttatactggatatggaaacagagaggagcaaaacttatctgacctactttccccgacctgtgaagtagctaatagtacagaacagaacactcaggagaatgaaagtcaagtttccacagacgacagtgaacactcctccagatcgctcagaagtaaagcacacagcaagtccaaagctgctccgtggacctcatttcttcctccaccacccccaatgccagggtcaggattaggaccaggaaagccaggtctaaaattcaacggcccgccgccgccgcctccactaccccctccccccttcctgccgtgctggatgcccccgttcccttcaggaccaccaataatcccgccaccccctcccatctctcccgactgtctggatgacactgatgccctgggcagtatgctaatctcttggtacatgagtggctaccacactggctactatatgggtttcagacaaaataaaaaagaaggaaagtgctcacatacaaattaagaagttcagctctgtctcaggagatggggtgtcggtgtccctggtcgacaagaacagacgtctcctcgtcatcagtggactcttggctaagtggtgtcgtcatcagcatctccccgctgtgggagtccatccatcctaagtcagcagcagagcgtgcctggggcgtgagcagttggagggaccgaccagtggagtgtgcgtgtcggaaggcagtctacccagtcgtgactgagcacaaatgtgcaattgtcattttcttagcatgtcaagatttttattaatgcctttagaattaaataaaagtccttttttgaaatcttg

SEQ ID NO: 384 - RNA, 1227 nt, Mus musculus
  source 1..1227: mol_type = mRNA
caagatttcaaaaaaggacttttatttaattctaaaggcattaataaaaatcttgacatgctaagaaaatgacaattgcacatttgtgctcagtcacgactgggtagactgccttccgacacgcacactccactggtcggtccctccaactgctcacgccccaggcacgctctgctgctgacttaggatggatggactcccacagcggggagatgctgatgacgacaccacttagccaagagtccactgatgacgaggagacgtctgttcttgtcgaccagggacaccgacaccccatctcctgagacagagctgaacttcttaatttgtatgtgagcactttccttcttttttattttgtctgaaacccatatagtagccagtgtggtagccactcatgtaccaagagattagcatactgcccagggcatcagtgtcatccagacagtcgggagagatgggagggggtggcgggattattggtggtcctgaagggaacgggggcatccagcacggcaggaaggggggagggggtagtggaggcggcggcggcgggccgttgaattttagacctggctttcctggtcctaatcctgaccctggcattgggggtggtggaggaagaaatgaggtccacggagcagctttggacttgctgtgtgctttacttctgagcgatctggaggagtgttcactgtcgtctgtggaaacttgactttcattctcctgagtgttctgttctgtactattagctacttcacaggtcggggaaagtaggtcagataagttttgctcctctctgtttccatatccagtataaaccacgacacaggtttctctcttaaagtcaatggacgtaatagtagctgggtaaatgcagccgtcttctgaccaaacagcagaacacttgtcaccaactttccactgtttcaagggagttgtggcattcttcttttggcttttattcttcttggcaggttttcttctggctgtgccttttggcttatctggagtttcacaaatgtcaccgttctttagagcatgcttaaaggaagccacagctttatcataagcttttatcaatgctgtatcatcccaaatgtcagaatcatcactctggccggtgccacgccggaacagcaccgtatcttcctgctcggagcccgctccgccactgcccatcgccatggcctgctaccacggacgctgccgggctcactcaatgac

SEQ ID NO: 385 - RNA, 1226 nt, Rattus norvegicus
  source 1..1226: mol_type = mRNA
atttgggcgagcccagccccgtccgtggtagcaggccatggcgatgggcagcggcggcgcgggctctgagcaggaagacaccgtgctgttccggcgtggcaccggccagagtgatgattctgacatttgggatgatacagcattgataaaagcttacgataaagccgtggcttcctttaagcatgctctaaagaacggtgacatgtgtgaaacttcagataagccaaaaggcacagctagaagaaaacctgctaagaagaataaaaaccaaaagaagaatgccacagctccattgaaacagtggaaagctggtgacaaatgctctgccgtttggtcggaagatggctgcgtttacccagctaccatcacgtcagttgaccttaagagagaaacctgtgtcgtggtttatactggatatggaaacaaagaggagcaaaacctatctgatctgctttccccgacctgtgaagtagctaacaatacagaacagaacactcaggagaatgaaagccaagtttccacagacgacagtgaacactcctccagatcgctcagaagtaaagcacacagcaagtccaaagctgctccatggacctcgtttctccctccacctcccccggtgcccggggcgggattaggaccaggaaagccaggtctaaggttcaatggcccaccgccgccgccacctccccctcccccgttcttgccgtgttggatgcctccgttcccttcaggaccaccaataattcctccaccccctcccatatctcccgactgtctggatgacacggatgctctgggcagtatgctaatctcttggtacatgagtggttaccacactggttactatatgggtttcagacaaaataaaaaagaaggaaagaagtgctcacatacaaattaagaagttcagctctctcccaaggagatggtttgttggtgtccctggtcgataagaacagaagtctcctcgtcacctttgtggactcttggctaagtggtgtcatcatcagggtctccctgtcccgggagtccatcctgagtcagcagcagggcatgcatagagcagcagttggaggaaccgatcaatcgatcgatcagtggcagtgtgagtgcatggaagtcagccaaactgtgactgagcacaaacggacaattgcaattttcttagaatgtcaagatttgtattaatgcctttaaaattaaataaaagcccttttttgaaa

SEQ ID NO: 386 - RNA, 1226 nt, Rattus norvegicus
  source 1..1226: mol_type = mRNA
tttcaaaaaagggcttttatttaattttaaaggcattaatacaaatcttgacattctaagaaaattgcaattgtccgtttgtgctcagtcacagtttggctgacttccatgcactcacactgccactgatcgatcgattgatcggttcctccaactgctgctctatgcatgccctgctgctgactcaggatggactcccgggacagggagaccctgatgatgacaccacttagccaagagtccacaaaggtgacgaggagacttctgttcttatcgaccagggacaccaacaaaccatctccttgggagagagctgaacttcttaatttgtatgtgagcacttctttccttcttttttattttgtctgaaacccatatagtaaccagtgtggtaaccactcatgtaccaagagattagcatactgcccagagcatccgtgtcatccagacagtcgggagatatgggagggggtggaggaattattggtggtcctgaagggaacggaggcatccaacacggcaagaacgggggagggggaggtggcggcggcggtgggccattgaaccttagacctggctttcctggtcctaatcccgccccgggcaccgggggaggtggagggagaaacgaggtccatggagcagctttggacttgctgtgtgctttacttctgagcgatctggaggagtgttcactgtcgtctgtggaaacttggctttcattctcctgagtgttctgttctgtattgttagctacttcacaggtcggggaaagcagatcagataggttttgctcctctttgtttccatatccagtataaaccacgacacaggtttctctcttaaggtcaactgacgtgatggtagctgggtaaacgcagccatcttccgaccaaacggcagagcatttgtcaccagctttccactgtttcaatggagctgtggcattcttcttttggtttttattcttcttagcaggttttcttctagctgtgccttttggcttatctgaagtttcacacatgtcaccgttctttagagcatgcttaaaggaagccacggctttatcgtaagcttttatcaatgctgtatcatcccaaatgtcagaatcatcactctggccggtgccacgccggaacagcacggtgtcttcctgctcagagcccgcgccgccgctgcccatcgccatggcctgctaccacggacggggctgggctcgcccaaat

SEQ ID NO: 387 - RNA, 1478 nt, Macaca mulatta
  source 1..1478: mol_type = mRNA
ctcgaagaagggaaggggccccacgctgcgcacccgcaagtttactatggcgatgagcagcggcggcagtggtggcggcgtcccggagcaggaggattccgtgctgttccggcgcggcacaggccagagtgatgattctgacatttgggatgatacagcattgataaaagcatatgataaagctgtggcttcatttaagcatgctctgaagaatggtgacatttgtgaaacttcaggtaaaccaaaaaccacacctaaaagaaaacctgctaagaagaataaaagccaaaagaagaatactgcagctcccttaaaacagtggaaagttggggacaaatgttctgccatttggtcagaagacggttgcatttacccagctaccattgcttcggttgattttaagagagaaacctgtgttgtggtttacactggatatggaaatagagaggagcaaaatctgtctgatctactttccccaatctctgaagtagctaataatatagaacagaatgctcaagagaatgaaaatgaaagccaagtttcaacagatgaaagtgagaactccaggtctcctggaagtaaatcagataatatcaagtccaaatctgctccatggaactcttttctccctccaccaccccccatgccagggccaagacttggaccaggaaagccaggtctaaaattcaatggcccaccaccgccgccgccaccaccaccaccccacttactatcatgctggatgcctccatttccttctggaccaccaataattcccccaccacctcccatatgtccagattctcttgatgatgctgatgctttgggaagtatgttaatttcatggtacatgagtggctatcacactggctattatatgggtttcagacaaaatcagaaagaaggaaggtgctcacattccttaaattaaggagaaatgctggcatagagcagcactaaatgataccactaaagaaacgatcagacagatctggaatgtgaagcgttatagaagataactggcctcatttcttcaaaataccagtgttgggaaagaaaaaaggaagtggagtgggtaactcttccagattaaaagttatgtaataaccaaatgcaatgtgaaatattttattgggccctattttgaaaaaccatctgtaaaagactggggtgggggtgggaggccaacacggtgctgaggcagttgagaaaattggaatgtggattagattttgaatgatactggataattattggtaattttatgagctgtgagaagggtgttgtagtttataaaagactgtcttaatttgcatacttaagcatttaggaatgaagtgttagaacgtcttaaaatgtttaaaatggtttaacaaaatgtgatgtgatgcatatgtggcaaaatgttacagaatctaactggtggacatggctgttcattgtactgtttttttctatcttctgtatgtttaaaagga

SEQ ID NO: 388 - RNA, 1478 nt, Macaca mulatta
  source 1..1478: mol_type = mRNA
tccttttaaacatacagaagatagaaaaaaacagtacaatgaacagccatgtccaccagttagattctgtaacattttgccacatatgcatcacatcacattttgttaaaccattttaaacattttaagacgttctaacacttcattcctaaatgcttaagtatgcaaattaagacagtcttttataaactacaacacccttctcacagctcataaaattaccaataattatccagtatcattcaaaatctaatccacattccaattttctcaactgcctcagcaccgtgttggcctcccacccccaccccagtcttttacagatggtttttcaaaatagggcccaataaaatatttcacattgcatttggttattacataacttttaatctggaagagttacccactccacttccttttttctttcccaacactggtattttgaagaaatgaggccagttatcttctataacgcttcacattccagatctgtctgatcgtttctttagtggtatcatttagtgctgctctatgccagcatttctccttaatttaaggaatgtgagcaccttccttctttctgattttgtctgaaacccatataatagccagtgtgatagccactcatgtaccatgaaattaacatacttcccaaagcatcagcatcatcaagagaatctggacatatgggaggtggtgggggaattattggtggtccagaaggaaatggaggcatccagcatgatagtaagtggggtggtggtggtggcggcggcggtggtgggccattgaattttagacctggctttcctggtccaagtcttggccctggcatggggggtggtggagggagaaaagagttccatggagcagatttggacttgatattatctgatttacttccaggagacctggagttctcactttcatctgttgaaacttggctttcattttcattctcttgagcattctgttctatattattagctacttcagagattggggaaagtagatcagacagattttgctcctctctatttccatatccagtgtaaaccacaacacaggtttctctcttaaaatcaaccgaagcaatggtagctgggtaaatgcaaccgtcttctgaccaaatggcagaacatttgtccccaactttccactgttttaagggagctgcagtattcttcttttggcttttattcttcttagcaggttttcttttaggtgtggtttttggtttacctgaagtttcacaaatgtcaccattcttcagagcatgcttaaatgaagccacagctttatcatatgcttttatcaatgctgtatcatcccaaatgtcagaatcatcactctggcctgtgccgcgccggaacagcacggaatcctcctgctccgggacgccgccaccactgccgccgctgctcatcgccatagtaaacttgcgggtgcgcagcgtggggccccttcccttcttcgag

SEQ ID NO: 389 - RNA, 3751 nt, Homo sapiens
  source 1..3751: mol_type = mRNA
cgaccccggagtctccgcgggcggccagggcgcgcgtgcgcggaggtgagccgggccggggctgcggggcttccctgagcgcgggccgggtcggtggggcggtcggctgcccgcgcggcctctcagttgggaaagctgaggttgtcgccggggccgcgggtggaggtcggggatgaggcagcaggtaggacagtgacctcggtgacgcgaaggaccccggccacctctaggttctcctcgtccgcccgttgttcagcgagggaggctctgcgcgtgccgcagctgacggggaaactgaggcacggagcgggcctgtaggagctgtccaggccatctccaaccatgggagtgaggcacccgccctgctcccaccggctcctggccgtctgcgccctcgtgtccttggcaaccgctgcactcctggggcacatcctactccatgatttcctgctggttccccgagagctgagtggctcctccccagtcctggaggagactcacccagctcaccagcagggagccagcagaccagggccccgggatgcccaggcacaccccggccgtcccagagcagtgcccacacagtgcgacgtcccccccaacagccgcttcgattgcgcccctgacaaggccatcacccaggaacagtgcgaggcccgcggctgttgctacatccctgcaaagcaggggctgcagggagcccagatggggcagccctggtgcttcttcccacccagctaccccagctacaagctggagaacctgagctcctctgaaatgggctacacggccaccctgacccgtaccacccccaccttcttccccaaggacatcctgaccctgcggctggacgtgatgatggagactgagaaccgcctccacttcacgatcaaagatccagctaacaggcgctacgaggtgcccttggagaccccgcatgtccacagccgggcaccgtccccactctacagcgtggagttctccgaggagcccttcggggtgatcgtgcgccggcagctggacggccgcgtgctgctgaacacgacggtggcgcccctgttctttgcggaccagttccttcagctgtccacctcgctgccctcgcagtatatcacaggcctcgccgagcacctcagtcccctgatgctcagcaccagctggaccaggatcaccctgtggaaccgggaccttgcgcccacgcccggtgcgaacctctacgggtctcaccctttctacctggcgctggaggacggcgggtcggcacacggggtgttcctgctaaacagcaatgccatggatgtggtcctgcagccgagccctgcccttagctggaggtcgacaggtgggatcctggatgtctacatcttcctgggcccagagcccaagagcgtggtgcagcagtacctggacgttgtgggatacccgttcatgccgccatactggggcctgggcttccacctgtgccgctggggctactcctccaccgctatcacccgccaggtggtggagaacatgaccagggcccacttccccctggacgtccagtggaacgacctggactacatggactcccggagggacttcacgttcaacaaggatggcttccgggacttcccggccatggtgcaggagctgcaccagggcggccggcgctacatgatgatcgtggatcctgccatcagcagctcgggccctgccgggagctacaggccctacgacgagggtctgcggaggggggttttcatcaccaacgagaccggccagccgctgattgggaaggtatggcccgggtccactgccttccccgacttcaccaaccccacagccctggcctggtgggaggacatggtggctgagttccatgaccaggtgcccttcgacggcatgtggattgacatgaacgagccttccaacttcatcaggggctctgaggacggctgccccaacaatgagctggagaacccaccctacgtgcctggggtggttggggggaccctccaggcggccaccatctgtgcctccagccaccagtttctctccacacactacaacctgcacaacctctacggcctgaccgaagccatcgcctcccacagggcgctggtgaaggctcgggggacacgcccatttgtgatctcccgctcgacctttgctggccacggccgatacgccggccactggacgggggacgtgtggagctcctgggagcagctcgcctcctccgtgccagaaatcctgcagtttaacctgctgggggtgcctctggtcggggccgacgtctgcggcttcctgggcaacacctcagaggagctgtgtgtgcgctggacccagctgggggccttctaccccttcatgcggaaccacaacagcctgctcagtctgccccaggagccgtacagcttcagcgagccggcccagcaggccatgaggaaggccctcaccctgcgctacgcactcctcccccacctctacacactgttccaccaggcccacgtcgcgggggagaccgtggcccggcccctcttcctggagttccccaaggactctagcacctggactgtggaccaccagctcctgtggggggaggccctgctcatcaccccagtgctccaggccgggaaggccgaagtgactggctacttccccttgggcacatggtacgacctgcagacggtgccagtagaggcccttggcagcctcccacccccacctgcagctccccgtgagccagccatccacagcgaggggcagtgggtgacgctgccggcccccctggacaccatcaacgtccacctccgggctgggtacatcatccccctgcagggccctggcctcacaaccacagagtcccgccagcagcccatggccctggctgtggccctgaccaagggtggggaggcccgaggggagctgttctgggacgatggagagagcctggaagtgctggagcgaggggcctacacacaggtcatcttcctggccaggaataacacgatcgtgaatgagctggtacgtgtgaccagtgagggagctggcctgcagctgcagaaggtgactgtcctgggcgtggccacggcgccccagcaggtcctctccaacggtgtccctgtctccaacttcacctacagccccgacaccaaggtcctggacatctgtgtctcgctgttgatgggagagcagtttctcgtcagctggtgttagccgggcggagtgtgttagtctctccagagggaggctggttccccagggaagcagagcctgtgtgcgggcagcagctgtgtgcgggcctgggggttgcatgtgtcacctggagctgggcactaaccattccaagccgccgcatcgcttgtttccacctcctgggccggggctctggcccccaacgtgtctaggagagctttctccctagatcgcactgtgggccggggccctggagggctgctctgtgttaataagattgtaaggtttgccctcctcacctgttgccggcatgcgggtagtattagccacccccctccatctgttcccagcaccggagaagggggtgctcaggtggaggtgtggggtatgcacctgagctcctgcttcgcgcctgctgctctgccccaacgcgaccgctgcccggctgcccagagggctggatgcctgccggtccccgagcaagcctgggaactcaggaaaattcacaggacttgggagattctaaatcttaagtgcaattatttttaataaaaggggcatttggaatcag

SEQ ID NO: 390 - RNA, 3751 nt, Homo sapiens
  source 1..3751: mol_type = mRNA
ctgattccaaatgccccttttattaaaaataattgcacttaagatttagaatctcccaagtcctgtgaattttcctgagttcccaggcttgctcggggaccggcaggcatccagccctctgggcagccgggcagcggtcgcgttggggcagagcagcaggcgcgaagcaggagctcaggtgcataccccacacctccacctgagcacccccttctccggtgctgggaacagatggaggggggtggctaatactacccgcatgccggcaacaggtgaggagggcaaaccttacaatcttattaacacagagcagccctccagggccccggcccacagtgcgatctagggagaaagctctcctagacacgttgggggccagagccccggcccaggaggtggaaacaagcgatgcggcggcttggaatggttagtgcccagctccaggtgacacatgcaacccccaggcccgcacacagctgctgcccgcacacaggctctgcttccctggggaaccagcctccctctggagagactaacacactccgcccggctaacaccagctgacgagaaactgctctcccatcaacagcgagacacagatgtccaggaccttggtgtcggggctgtaggtgaagttggagacagggacaccgttggagaggacctgctggggcgccgtggccacgcccaggacagtcaccttctgcagctgcaggccagctccctcactggtcacacgtaccagctcattcacgatcgtgttattcctggccaggaagatgacctgtgtgtaggcccctcgctccagcacttccaggctctctccatcgtcccagaacagctcccctcgggcctccccacccttggtcagggccacagccagggccatgggctgctggcgggactctgtggttgtgaggccagggccctgcagggggatgatgtacccagcccggaggtggacgttgatggtgtccaggggggccggcagcgtcacccactgcccctcgctgtggatggctggctcacggggagctgcaggtgggggtgggaggctgccaagggcctctactggcaccgtctgcaggtcgtaccatgtgcccaaggggaagtagccagtcacttcggccttcccggcctggagcactggggtgatgagcagggcctccccccacaggagctggtggtccacagtccaggtgctagagtccttggggaactccaggaagaggggccgggccacggtctcccccgcgacgtgggcctggtggaacagtgtgtagaggtgggggaggagtgcgtagcgcagggtgagggccttcctcatggcctgctgggccggctcgctgaagctgtacggctcctggggcagactgagcaggctgttgtggttccgcatgaaggggtagaaggcccccagctgggtccagcgcacacacagctcctctgaggtgttgcccaggaagccgcagacgtcggccccgaccagaggcacccccagcaggttaaactgcaggatttctggcacggaggaggcgagctgctcccaggagctccacacgtcccccgtccagtggccggcgtatcggccgtggccagcaaaggtcgagcgggagatcacaaatgggcgtgtcccccgagccttcaccagcgccctgtgggaggcgatggcttcggtcaggccgtagaggttgtgcaggttgtagtgtgtggagagaaactggtggctggaggcacagatggtggccgcctggagggtccccccaaccaccccaggcacgtagggtgggttctccagctcattgttggggcagccgtcctcagagcccctgatgaagttggaaggctcgttcatgtcaatccacatgccgtcgaagggcacctggtcatggaactcagccaccatgtcctcccaccaggccagggctgtggggttggtgaagtcggggaaggcagtggacccgggccataccttcccaatcagcggctggccggtctcgttggtgatgaaaacccccctccgcagaccctcgtcgtagggcctgtagctcccggcagggcccgagctgctgatggcaggatccacgatcatcatgtagcgccggccgccctggtgcagctcctgcaccatggccgggaagtcccggaagccatccttgttgaacgtgaagtccctccgggagtccatgtagtccaggtcgttccactggacgtccagggggaagtgggccctggtcatgttctccaccacctggcgggtgatagcggtggaggagtagccccagcggcacaggtggaagcccaggccccagtatggcggcatgaacgggtatcccacaacgtccaggtactgctgcaccacgctcttgggctctgggcccaggaagatgtagacatccaggatcccacctgtcgacctccagctaagggcagggctcggctgcaggaccacatccatggcattgctgtttagcaggaacaccccgtgtgccgacccgccgtcctccagcgccaggtagaaagggtgagacccgtagaggttcgcaccgggcgtgggcgcaaggtcccggttccacagggtgatcctggtccagctggtgctgagcatcaggggactgaggtgctcggcgaggcctgtgatatactgcgagggcagcgaggtggacagctgaaggaactggtccgcaaagaacaggggcgccaccgtcgtgttcagcagcacgcggccgtccagctgccggcgcacgatcaccccgaagggctcctcggagaactccacgctgtagagtggggacggtgcccggctgtggacatgcggggtctccaagggcacctcgtagcgcctgttagctggatctttgatcgtgaagtggaggcggttctcagtctccatcatcacgtccagccgcagggtcaggatgtccttggggaagaaggtgggggtggtacgggtcagggtggccgtgtagcccatttcagaggagctcaggttctccagcttgtagctggggtagctgggtgggaagaagcaccagggctgccccatctgggctccctgcagcccctgctttgcagggatgtagcaacagccgcgggcctcgcactgttcctgggtgatggccttgtcaggggcgcaatcgaagcggctgttgggggggacgtcgcactgtgtgggcactgctctgggacggccggggtgtgcctgggcatcccggggccctggtctgctggctccctgctggtgagctgggtgagtctcctccaggactggggaggagccactcagctctcggggaaccagcaggaaatcatggagtaggatgtgccccaggagtgcagcggttgccaaggacacgagggcgcagacggccaggagccggtgggagcagggcgggtgcctcactcccatggttggagatggcctggacagctcctacaggcccgctccgtgcctcagtttccccgtcagctgcggcacgcgcagagcctccctcgctgaacaacgggcggacgaggagaacctagaggtggccggggtccttcgcgtcaccgaggtcactgtcctacctgctgcctcatccccgacctccacccgcggccccggcgacaacctcagctttcccaactgagaggccgcgcgggcagccgaccgccccaccgacccggcccgcgctcagggaagccccgcagccccggcccggctcacctccgcgcacgcgcgccctggccgcccgcggagactccggggtcg

SEQ ID NO: 391 - RNA, 3579 nt, Mus musculus
  source 1..3579: mol_type = mRNA
acacggactccgccgcctacgcaggaggtcgtgtgacgaggtccgcgcggacgagccccgcccacagaccacgtgacccacgctgcccgctgagcctgggggtcttcggcctggagggtgattgcgcaggtgagctgggcgagctggtgaaggctgtctccggccccagagcctccggaggagcggcctcctccaggcaggcagggccgactgtcagcgagttcctgctttggagaatcgagcagagacacgcggcataggccttcagaagtattcatgctgccccgaaccaacaggctttcaccatgaatatacggaagcccctctgttcgaactccgtggttggggcctgcacccttatctctctgactacagcggtcatcctgggtcatctcatgcttcgggagttaatgctgcttccccaagaccttcatgagtcctcttcaggactgtggaagacgtaccgacctcaccaccaggaaggttacaagccagggcctctgcacatccaggagcagactgaacagcccaaagaagcacccacacagtgtgatgtgccccccagcagccgctttgactgtgcccccgacaaaggcatctcacaggagcaatgcgaggcccgcggctgctgctatgtcccagcagggcaggtgctgaaggagccgcagatagggcagccctggtgtttcttccctcccagctacccaagctaccgtctagagaacctgagctctacagagtcggggtacacagccaccctgacccgtaccagcccgaccttcttcccaaaggatgtgctgaccttacagctggaggtgctgatggagacagacagccgcctccacttcaagatcaaagatcctgctagtaagcgctacgaagtgcccctggagaccccacgtgtgctgagccaggcaccatccccactttacagcgtggaattctcagaggaaccctttggagtgatcgttcgtaggaagcttggtggccgagtgttgctgaacacaaccgtggcccccctgttcttcgctgaccagttcctgcagctgtccacttccctgccctcccagcacatcacaggcctgggggaacacctcagcccactcatgctcagcaccgactgggctcgtatcaccctctggaaccgggacacaccaccctcgcaaggtaccaacctctacgggtcacatcctttctacctggcactggaggacggtggcttggctcacggtgtcttcttgctaaacagcaatgccatggatgtcatcctgcaacccagcccagccctaacctggaggtcaacgggcgggatcctggatgtgtatgtgttcctaggcccagagcccaagagcgttgtgcaacaatacctggatgttgtgggataccccttcatgcctccatactggggcctcggcttccacctctgccgctggggctactcctcgaccgccattgtccgccaggtagtggagaacatgaccaggacacacttcccgctggacgtgcaatggaatgacctggactacatggacgcccgaagagacttcaccttcaaccaggacagctttgccgacttcccagacatggtgcgggagctgcaccaggatggccggcgctacatgatgatcgtggaccctgccatcagcagcgcaggccctgctgggagttacaggccctacgacgagggtctgcggaggggcgtgttcatcaccaacgagactgggcagccgctgattgggaaggtttggcctggaaccaccgccttccctgatttcaccaaccctgagacccttgactggtggcaggacatggtgtctgagttccacgcccaggtgcccttcgatggcatgtggctcgacatgaacgaaccgtccaacttcgttagaggctctcagcagggctgccccaacaatgaactggagaaccccccctatgtgcccggggtggttggcgggatcttgcaggcagccaccatctgtgcctccagccaccaattcctctccacacactacaacctccacaacctgtacggcctcactgaagctatcgcctccagcagggccctggtcaagactcggggaacacgaccctttgtgatctcccgctcaaccttctcgggccacggccggtacgctggtcactggacaggggatgtgcggagctcttgggagcatcttgcatactctgtgccagacatcctgcagttcaacctgctgggcgtgcccctggtcggggcggacatctgcggcttcataggagacacgtcagaagagctgtgtgtgcgctggacccagttgggggccttctaccccttcatgcggaaccacaatgacctgaatagcgtgcctcaggagccgtacaggttcagcgagacggcgcagcaggccatgaggaaggccttcgccttacgctatgcccttctgccctacctgtacactctcttccaccgcgcccacgtcagaggagacacggtggcccggcccctcttcctggagttccctgaggatcccagcacctggtctgtggaccgccagctcttgtgggggccggccctgctcatcacacctgtgcttgagcctgggaaaactgaagtgacgggctacttccccaagggcacgtggtacaacatgcagatggtgtcagtggattccctcggtactctcccttctccatcatcggcttcatccttcagatctgctgtccagagcaaggggcagtggctgacactggaagccccactggataccatcaacgtgcacctgagggaggggtacatcataccgctgcagggtcccagcctcacaaccacggagtcccgaaagcagcccatggctctggctgtggcattaacagcaagcggcgaggccgatggggagctgttctgggacgacggggagagcctcgcggttctggagcgtggggcctacacactggtcaccttctcagccaagaacaataccattgtgaacaagttagtgcgtgtgaccaaggagggagctgagctacaactgagggaggtgaccgtcttgggagtggccacagctcctacccaggtcctttccaacggcatccctgtctccaatttcacctacagccctgacaacaagagcctggccatccctgtctcactgctgatgggagagctgtttcaaatcagctggtcctaggagagtccgtcgtttacagaggcctccagggaggcagagggagcttgagctggctctggctggtggctcctgtaaggacctgcgtcctgctctcctgacacatctttgagcttttcccaccgtgttactgcatgcgcccctgaagctctgtgttcttaggagagtgaggctcgcctcacctgccccaccccagctgtctgtccctcacctggcactagagaatgtggagctcggcgtggggacatcgtgtctgcaccaacatcaggctgtgcagccactgcagccgcaaccctgcagagacagagctggtgccttcaccaggttcccaagactcgagaaacttactgtgaagtgtacttacttttaataaaaaggatattgtttggaagcagttaaaaaaaaaaaaaaaaaa

SEQ ID NO: 392 - RNA, 3579 nt, Mus musculus
  source 1..3579: mol_type = mRNA
ttttttttttttttttttaactgcttccaaacaatatcctttttattaaaagtaagtacacttcacagtaagtttctcgagtcttgggaacctggtgaaggcaccagctctgtctctgcagggttgcggctgcagtggctgcacagcctgatgttggtgcagacacgatgtccccacgccgagctccacattctctagtgccaggtgagggacagacagctggggtggggcaggtgaggcgagcctcactctcctaagaacacagagcttcaggggcgcatgcagtaacacggtgggaaaagctcaaagatgtgtcaggagagcaggacgcaggtccttacaggagccaccagccagagccagctcaagctccctctgcctccctggaggcctctgtaaacgacggactctcctaggaccagctgatttgaaacagctctcccatcagcagtgagacagggatggccaggctcttgttgtcagggctgtaggtgaaattggagacagggatgccgttggaaaggacctgggtaggagctgtggccactcccaagacggtcacctccctcagttgtagctcagctccctccttggtcacacgcactaacttgttcacaatggtattgttcttggctgagaaggtgaccagtgtgtaggccccacgctccagaaccgcgaggctctccccgtcgtcccagaacagctccccatcggcctcgccgcttgctgttaatgccacagccagagccatgggctgctttcgggactccgtggttgtgaggctgggaccctgcagcggtatgatgtacccctccctcaggtgcacgttgatggtatccagtggggcttccagtgtcagccactgccccttgctctggacagcagatctgaaggatgaagccgatgatggagaagggagagtaccgagggaatccactgacaccatctgcatgttgtaccacgtgcccttggggaagtagcccgtcacttcagttttcccaggctcaagcacaggtgtgatgagcagggccggcccccacaagagctggcggtccacagaccaggtgctgggatcctcagggaactccaggaagaggggccgggccaccgtgtctcctctgacgtgggcgcggtggaagagagtgtacaggtagggcagaagggcatagcgtaaggcgaaggccttcctcatggcctgctgcgccgtctcgctgaacctgtacggctcctgaggcacgctattcaggtcattgtggttccgcatgaaggggtagaaggcccccaactgggtccagcgcacacacagctcttctgacgtgtctcctatgaagccgcagatgtccgccccgaccaggggcacgcccagcaggttgaactgcaggatgtctggcacagagtatgcaagatgctcccaagagctccgcacatcccctgtccagtgaccagcgtaccggccgtggcccgagaaggttgagcgggagatcacaaagggtcgtgttccccgagtcttgaccagggccctgctggaggcgatagcttcagtgaggccgtacaggttgtggaggttgtagtgtgtggagaggaattggtggctggaggcacagatggtggctgcctgcaagatcccgccaaccaccccgggcacatagggggggttctccagttcattgttggggcagccctgctgagagcctctaacgaagttggacggttcgttcatgtcgagccacatgccatcgaagggcacctgggcgtggaactcagacaccatgtcctgccaccagtcaagggtctcagggttggtgaaatcagggaaggcggtggttccaggccaaaccttcccaatcagcggctgcccagtctcgttggtgatgaacacgcccctccgcagaccctcgtcgtagggcctgtaactcccagcagggcctgcgctgctgatggcagggtccacgatcatcatgtagcgccggccatcctggtgcagctcccgcaccatgtctgggaagtcggcaaagctgtcctggttgaaggtgaagtctcttcgggcgtccatgtagtccaggtcattccattgcacgtccagcgggaagtgtgtcctggtcatgttctccactacctggcggacaatggcggtcgaggagtagccccagcggcagaggtggaagccgaggccccagtatggaggcatgaaggggtatcccacaacatccaggtattgttgcacaacgctcttgggctctgggcctaggaacacatacacatccaggatcccgcccgttgacctccaggttagggctgggctgggttgcaggatgacatccatggcattgctgtttagcaagaagacaccgtgagccaagccaccgtcctccagtgccaggtagaaaggatgtgacccgtagaggttggtaccttgcgagggtggtgtgtcccggttccagagggtgatacgagcccagtcggtgctgagcatgagtgggctgaggtgttcccccaggcctgtgatgtgctgggagggcagggaagtggacagctgcaggaactggtcagcgaagaacaggggggccacggttgtgttcagcaacactcggccaccaagcttcctacgaacgatcactccaaagggttcctctgagaattccacgctgtaaagtggggatggtgcctggctcagcacacgtggggtctccaggggcacttcgtagcgcttactagcaggatctttgatcttgaagtggaggcggctgtctgtctccatcagcacctccagctgtaaggtcagcacatcctttgggaagaaggtcgggctggtacgggtcagggtggctgtgtaccccgactctgtagagctcaggttctctagacggtagcttgggtagctgggagggaagaaacaccagggctgccctatctgcggctccttcagcacctgccctgctgggacatagcagcagccgcgggcctcgcattgctcctgtgagatgcctttgtcgggggcacagtcaaagcggctgctggggggcacatcacactgtgtgggtgcttctttgggctgttcagtctgctcctggatgtgcagaggccctggcttgtaaccttcctggtggtgaggtcggtacgtcttccacagtcctgaagaggactcatgaaggtcttggggaagcagcattaactcccgaagcatgagatgacccaggatgaccgctgtagtcagagagataagggtgcaggccccaaccacggagttcgaacagaggggcttccgtatattcatggtgaaagcctgttggttcggggcagcatgaatacttctgaaggcctatgccgcgtgtctctgctcgattctccaaagcaggaactcgctgacagtcggccctgcctgcctggaggaggccgctcctccggaggctctggggccggagacagccttcaccagctcgcccagctcacctgcgcaatcaccctccaggccgaagacccccaggctcagcgggcagcgtgggtcacgtggtctgtgggcggggctcgtccgcgcggacctcgtcacacgacctcctgcgtaggcggcggagtccgtgt

SEQ ID NO: 393 - RNA, 3408 nt, Rattus norvegicus
  source 1..3408: mol_type = mRNA
gagcgagctgttgaaggctgtttcaggccccagagcctccggaggaacggcctcctcccggcaggcggggccggccgactatcggcgagttcctgctggggagaatcgagcagagacacccggcataggccttcagaactattcatgctgccctgggcttggctttcatcatgaatatacggaagcccctctgttccaactccgtggttggggcctgcaccctcgtctccttgactacggctgtcatcctgggtcacctcatgctccgggagctaatgctactcccccaggatcttcatgagtcctcctcgggactgtggaagacttaccgacctcaccatcaggaaagttacgagccagcgcccctgcacatccaggagcacgccgaacagctaagagcagtacccacacagtgtgatgtaacccccaacagccgctttgactgtgcccccgacaaaggcatcacccaggagcagtgcgaggcccgaggctgctgctgggtcccagcagggcaggtgctgaatgggccagtgatggggcagccctggtgtttcttccctcccagctacccaagctaccggctagagaacctgagctctacagagtcagggtacacagccaccctgacccggaccagtccgaccttctttccaaaggatgtgctgaccttacagctggaggtgctgatggagactgacagccgcctccactttatgatcaaagatcccactagtaagcgctacgaagtgcccctggagaccccgcgtgtcctgagccaggcgccatccccactttacagtgtggagttctcagaggagcccttcggcgtgatcgttcgcaggaagcttggtggccgagtgctgctgaacacaaccgtggcccccctgttcttcgctgaccagttcctgcagctgtccacctcactgccctcccagcacatcgcaggcctgggtgagcacctcagtccactcatgctcagcaccgaatggactcgcatcaccctctggaaccgggatgtggcaccctcgcaaggtgtcaacctctatgggtcacaccctttctacctggcactggaggacggtggcttggctcacggtgtcttcttgctaaatagcaatgccatggatgtggtcctgcagcccagcccggccctaacttggaggtcaacaggcggaatcctggatgtttatgtgttcctaggcccagagcccaagagtgttgtccaacaatacctggatgtcgtgggataccccttcatgcctccgtactggggcctgggcttccacctctgccgctggggctactcctccaccgccatcgtccgacaggtggtggagaacatgaccaggacgcacttccccctggacgtgcagtggaatgacctggactacatggacgcccggagagacttcactttcaaccaggacggctttgcagacttcccagacatggtgcacgagctccaccagggtggccggcggtacatgatgattgtggaccctgccatcagcagttcaggccctgctgggagttacaggccctatgatgagggtcttcggaggggcgtgttcatcaccaatgagactgggcagccattgattgggaaggtttggcctggatccaccgccttccctgatttcaccaaccctgagaccctcgactggtggcaggacatggtgtctgagttccatgcccaggtgcccttcgatggcatgtggatcgacatgaacgaaccgtccaacttcatcagaggctctcagcagggctgccctgacaatgaactagagaaccccccctatgtgcccggggtggttggcggggccttgcaggccgccaccatctgtgcctccagccaccagttcctctctacacactacaacctccacaacctatacggcctcactgaagcaattgcctccagcagggccctagtcaagactcggggaacacgaccctttgtgatctcccgctcaacctttgcgggccacggccggtatgccggtcactggacaggggacgtgtggagctcttgggagcatcttgcgtactctgtgccagaaatcctgcagtttaacctgctgggcgtgcccctggtcggggcagacatctgcggcttccagggaaacacgacagaagagctgtgtgtgcgctggacccagttgggggccttctaccccttcatgcggaaccacaatgacctgaatagcttgcctcaggagccgtacaggttcagcgagacggcacagcaggccatgaggaaggccttcaccttgcgctatgcccttctaccctacctgtatacactcttccacggcgcccacgtcaaaggggacacggtggcccggcccctcttcctggagttccctgaggatcccagcacctggtctgtggaccgccagctcttgtgggggccggccctgcttatcacacctgtgcttgaacctgggaaaactgacgtgacaggctacttccccaagggcatgtggtacaacctgcagatggtacctgtggagacccttggtagcctcccttcttcgtcaccagcctcgtctttcagatctattgtccacagcaagggtcagtggctgacactggaagcccccctggataccatcaacgtgcacctcagggcggggtacatcataccactgcagggtcccagcctcacaaccacagagtcccgaaagcagcccatggccctggctgtggcgttaactgaaagcggcgaggcctctggggagctgttttgggacgacggggagagcctcggggttctggagcgtggggcctacacactggtcaccttctcagccaagaataataccattgtaaacaagttagtgcacgtgaccaaggagggaggtgaactgcaactgagggaggtgaccatcttgggagtgaccacagctcccacccaggtcctttccaatggcatctctgtctccaatttcacctacagcccggacgacaagagcctgtccatccctgtctcactgctgatgggagagcggtttcaaatcgattggtcctaggagactttacagaggcccccctagaggccatgcgagtttgagctcgctctggctggtggctcctgtgaggacctgcgtcctgctctcctgacacacctttgagctttcccattgtgttgctgcatgcgcccctgaagctctgtgtggttaggaggagagtgaggcttgcctcgcctgccctaccccagctgtctgtccctcgcctcccactagagaatgtggagctcggcgtggggacgtcgtgtctgcaccaacatcaggctgcacagccactgagacttgagaaacttactgtgaagtgtacttaattttaataaaaaattgtttggaagcaaaaaaaaaaaaaaaaaaaaaaaaaaaaaaaaaaaaaaaaaaa

SEQ ID NO: 394 - RNA, 3408 nt, Rattus norvegicus
  source 1..3408: mol_type = mRNA
tttttttttttttttttttttttttttttttttttttttttttgcttccaaacaattttttattaaaattaagtacacttcacagtaagtttctcaagtctcagtggctgtgcagcctgatgttggtgcagacacgacgtccccacgccgagctccacattctctagtgggaggcgagggacagacagctggggtagggcaggcgaggcaagcctcactctcctcctaaccacacagagcttcaggggcgcatgcagcaacacaatgggaaagctcaaaggtgtgtcaggagagcaggacgcaggtcctcacaggagccaccagccagagcgagctcaaactcgcatggcctctaggggggcctctgtaaagtctcctaggaccaatcgatttgaaaccgctctcccatcagcagtgagacagggatggacaggctcttgtcgtccgggctgtaggtgaaattggagacagagatgccattggaaaggacctgggtgggagctgtggtcactcccaagatggtcacctccctcagttgcagttcacctccctccttggtcacgtgcactaacttgtttacaatggtattattcttggctgagaaggtgaccagtgtgtaggccccacgctccagaaccccgaggctctccccgtcgtcccaaaacagctccccagaggcctcgccgctttcagttaacgccacagccagggccatgggctgctttcgggactctgtggttgtgaggctgggaccctgcagtggtatgatgtaccccgccctgaggtgcacgttgatggtatccaggggggcttccagtgtcagccactgacccttgctgtggacaatagatctgaaagacgaggctggtgacgaagaagggaggctaccaagggtctccacaggtaccatctgcaggttgtaccacatgcccttggggaagtagcctgtcacgtcagttttcccaggttcaagcacaggtgtgataagcagggccggcccccacaagagctggcggtccacagaccaggtgctgggatcctcagggaactccaggaagaggggccgggccaccgtgtcccctttgacgtgggcgccgtggaagagtgtatacaggtagggtagaagggcatagcgcaaggtgaaggccttcctcatggcctgctgtgccgtctcgctgaacctgtacggctcctgaggcaagctattcaggtcattgtggttccgcatgaaggggtagaaggcccccaactgggtccagcgcacacacagctcttctgtcgtgtttccctggaagccgcagatgtctgccccgaccaggggcacgcccagcaggttaaactgcaggatttctggcacagagtacgcaagatgctcccaagagctccacacgtcccctgtccagtgaccggcataccggccgtggcccgcaaaggttgagcgggagatcacaaagggtcgtgttccccgagtcttgactagggccctgctggaggcaattgcttcagtgaggccgtataggttgtggaggttgtagtgtgtagagaggaactggtggctggaggcacagatggtggcggcctgcaaggccccgccaaccaccccgggcacatagggggggttctctagttcattgtcagggcagccctgctgagagcctctgatgaagttggacggttcgttcatgtcgatccacatgccatcgaagggcacctgggcatggaactcagacaccatgtcctgccaccagtcgagggtctcagggttggtgaaatcagggaaggcggtggatccaggccaaaccttcccaatcaatggctgcccagtctcattggtgatgaacacgcccctccgaagaccctcatcatagggcctgtaactcccagcagggcctgaactgctgatggcagggtccacaatcatcatgtaccgccggccaccctggtggagctcgtgcaccatgtctgggaagtctgcaaagccgtcctggttgaaagtgaagtctctccgggcgtccatgtagtccaggtcattccactgcacgtccagggggaagtgcgtcctggtcatgttctccaccacctgtcggacgatggcggtggaggagtagccccagcggcagaggtggaagcccaggccccagtacggaggcatgaaggggtatcccacgacatccaggtattgttggacaacactcttgggctctgggcctaggaacacataaacatccaggattccgcctgttgacctccaagttagggccgggctgggctgcaggaccacatccatggcattgctatttagcaagaagacaccgtgagccaagccaccgtcctccagtgccaggtagaaagggtgtgacccatagaggttgacaccttgcgagggtgccacatcccggttccagagggtgatgcgagtccattcggtgctgagcatgagtggactgaggtgctcacccaggcctgcgatgtgctgggagggcagtgaggtggacagctgcaggaactggtcagcgaagaacaggggggccacggttgtgttcagcagcactcggccaccaagcttcctgcgaacgatcacgccgaagggctcctctgagaactccacactgtaaagtggggatggcgcctggctcaggacacgcggggtctccaggggcacttcgtagcgcttactagtgggatctttgatcataaagtggaggcggctgtcagtctccatcagcacctccagctgtaaggtcagcacatcctttggaaagaaggtcggactggtccgggtcagggtggctgtgtaccctgactctgtagagctcaggttctctagccggtagcttgggtagctgggagggaagaaacaccagggctgccccatcactggcccattcagcacctgccctgctgggacccagcagcagcctcgggcctcgcactgctcctgggtgatgcctttgtcgggggcacagtcaaagcggctgttgggggttacatcacactgtgtgggtactgctcttagctgttcggcgtgctcctggatgtgcaggggcgctggctcgtaactttcctgatggtgaggtcggtaagtcttccacagtcccgaggaggactcatgaagatcctgggggagtagcattagctcccggagcatgaggtgacccaggatgacagccgtagtcaaggagacgagggtgcaggccccaaccacggagttggaacagaggggcttccgtatattcatgatgaaagccaagcccagggcagcatgaatagttctgaaggcctatgccgggtgtctctgctcgattctccccagcaggaactcgccgatagtcggccggccccgcctgccgggaggaggccgttcctccggaggctctggggcctgaaacagccttcaacagctcgctc

SEQ ID NO: 395 - RNA, 3727 nt, Macaca mulatta
  source 1..3727: mol_type = mRNA
ccggagtctccgtgggctgccggggcgcgcgtgcgcggaggtgagcggggccggggctgagcgagggacggttgggtagggcagtcggctgcccgcgcggcctctcaggtgggaaagctgaggttgtcgccggggccgcgggtggaggccggggatgaggcagcaggtgggacagtgacctccgtgacgcgaaagaccccggacacctttaggttctcctcgtccgcccgttgctcagcgagggaggctctgcgcgtgccgcagctgacggggaaactgaggcacggagcgggcctccaggagctgtccgggtcatctaccatgggagtgaggcacccgctctgctcccgccggctgctggccgtctgtgcccttgtgtccttggccaccgctgtgctcctgggacacatcctgctccatgatttcctgctggttccccgagagctgagtggatcctccttggtcctggaggagactcgcccagctcgccagcagggagccagcaggccagggccccagaatgcccaggcacaccccggctgtcccagagcagtgcccacacagtgcgacgtcccccctaacagccgcttcgactgtgcccctgacaaggccatcacccaggaacagtgcgaggcccgcggctgctgctacatccctgcaaagcaggaacttcggagagcccagatgggacagccctggtgcttcttcccacccagctaccccagctacaagctggagaacctgagtgcctctgaaatgggctacacggccaccctgacccgtaccacccccaccttcttccccaaggacatcctgaccttgcggctggacgtgatgatggagactgagaaccgcctccacttcacgatcaaagatcccgctaacaagcgctacgaggtgcccttggagaccccgcgtgtccccagccgggcactgtccccactctacagcgtggagttctccgaggagcccttcggggtgattgtgcgccggcagctggacggtcgtgtgctgctgaacacgacggtggcgcccctcttctttgcggaccagttccttcagttgtccacctcgctgccctcgcagtacatcacaggactcgccgagcacctcagtcccctgatgctcagcaccagctggaccaggatcaccctgtggaaccgggacctcgcgcccacgcccggtgcgaacctctacgggtctcaccctttctacctggcgctggaggatggcgggtcggcacatggggtgttcctgctgaatagcaatgccatggatgtggtcctgcagccgagccctgcccttagctggaggtcgacaggtgggatcctggatgtgtacatcttcctgggcccggagcccaagagcgtggtgcggcagtacctggatgttgtgggatacccgttcatgccgccatactggggcctgggcttccacctgtgccgctggggctactcctccaccgccatcacccgccaggtggtggagaacatgaccagggcccacttccccctggacgtccagtggaacgacttggactacatggactcccggagggacttcacgttcaacaaggatggcttccgggacttcccagccatggtgcaggagctgcaccagggcggccggcgctacgtgatgattgtggatcctgccatcagcatctcgggccctgccgggagctacagaccctacgacgagggtctgcggaggagagttttcatcaccaacgagaccggccagccgctgatcgggaaggtgtggcctgggtccactgccttccccgacttcaccaaccccgcagccctggcctggtgggaggacatggtggctgagttccatgaccaggtgcccttcgacggcatgtggattgacatgaacgagccttccaacttcatcaggggctctgaggacggctgcccccacaatgagctggaggagccaccctacgtgcctggggtggttggggggaccctccaggcggccaccatctgtgcctccagccaccagttcctctctacacactacaacctgcacaacctctacggcctgactgaagccattgcctcctacagggcactggtgaaggctcgggggacacgcccatttgtgatctcccgctcgacctttgctggccacggccgatatgccggccactggatgggggacgtgtggagctcctgggagcagctcgccgcctccgtgccagaaatcctgcagtttaacctgctgggggtgcctctggtcggggccgacgtctgcggcttcctgggcaacacctcagaggagctgtgtgtgcgctggacccagctgggggccttctacccctttatgcggaaccacaacggcctgctcaatctgccccaggagccatacagtttcagcgagccagcccagcaggccatgaggaaggccctcaccctgcgctacgcactcctcccccacctgtacacgctgttccaccaggcccacgtcgctggggagaccgtggcccggcctctcttcctggagttccccgaggactctagcacctggactgtggaccaccagctcctgtggggggaggccctgctcatcaccccagtgctgcaggccgggaaggccgaagtgaccggctacttcccctcaggcacatggtacaacctggagacggtgccaatagaggcccttggcagcctcccgcccccacctgcagctccccgtgagccagccatccacagcgaggggcagtgggtgacgctgccagcccccctggacaccatcaatgtccacctccgggctgggcacatcatccccctgcagggccctggcctcacaaccacagagtcccgccagcagcccatggccctggctgtggccctgaccaagggtggggaggcccgaggggagctgttctgggacgatggagagagcctggaagtgctggagcgagggtcctacacacaggtcatattcctggccaggagtaacacggtcatgaatgagctggtacatgtgaccagcgagggggctggcctgcagctgcagaaggtgaccgtcctgggcgtggccacagcgccccagcaggtcctctccaacggcgcccctgtctccaacttcacctacagccccgacaccaaggtcctggacatccctgtctcgctgttggtgggagagcagtttctcatcagctggtcttagcagggcggagtgtgtgaagtctctccggagggagactggttccccagggcagcagagcctgtgtgtgggcagcagctatgtgtgggcctgggggttggatgcgtcacctgcagctaagcactgacccgagctcccacatcgctcgtttctacctcctgggccggggctctgactcccaacatgtctaggagaggtttctccctctatcgcgccgtgggccggggccccggagggttgctctgcgttagtaagattgtcaggtttgcccccctcacctgttgccggtgtgcgggcagcattagccacccccctccatctgtccccagcactggagaaaggggtgctcggatggaggtgtgggatgtgcgcctcagttcctgcctcgcgcctgctgctccaccccaacaccaccacagcccggctgcccagagggctggatgcctgctggtccccgagcgagccccggaactcaggaaaattcacaagacttgggagattctaaatctgaagtgcaattgtttttaataaaaggggcatttggaatcag

SEQ ID NO: 396 - RNA, 3727 nt, Macaca mulatta
  source 1..3727: mol_type = mRNA
ctgattccaaatgccccttttattaaaaacaattgcacttcagatttagaatctcccaagtcttgtgaattttcctgagttccggggctcgctcggggaccagcaggcatccagccctctgggcagccgggctgtggtggtgttggggtggagcagcaggcgcgaggcaggaactgaggcgcacatcccacacctccatccgagcacccctttctccagtgctggggacagatggaggggggtggctaatgctgcccgcacaccggcaacaggtgaggggggcaaacctgacaatcttactaacgcagagcaaccctccggggccccggcccacggcgcgatagagggagaaacctctcctagacatgttgggagtcagagccccggcccaggaggtagaaacgagcgatgtgggagctcgggtcagtgcttagctgcaggtgacgcatccaacccccaggcccacacatagctgctgcccacacacaggctctgctgccctggggaaccagtctccctccggagagacttcacacactccgccctgctaagaccagctgatgagaaactgctctcccaccaacagcgagacagggatgtccaggaccttggtgtcggggctgtaggtgaagttggagacaggggcgccgttggagaggacctgctggggcgctgtggccacgcccaggacggtcaccttctgcagctgcaggccagccccctcgctggtcacatgtaccagctcattcatgaccgtgttactcctggccaggaatatgacctgtgtgtaggaccctcgctccagcacttccaggctctctccatcgtcccagaacagctcccctcgggcctccccacccttggtcagggccacagccagggccatgggctgctggcgggactctgtggttgtgaggccagggccctgcagggggatgatgtgcccagcccggaggtggacattgatggtgtccaggggggctggcagcgtcacccactgcccctcgctgtggatggctggctcacggggagctgcaggtgggggcgggaggctgccaagggcctctattggcaccgtctccaggttgtaccatgtgcctgaggggaagtagccggtcacttcggccttcccggcctgcagcactggggtgatgagcagggcctccccccacaggagctggtggtccacagtccaggtgctagagtcctcggggaactccaggaagagaggccgggccacggtctccccagcgacgtgggcctggtggaacagcgtgtacaggtgggggaggagtgcgtagcgcagggtgagggccttcctcatggcctgctgggctggctcgctgaaactgtatggctcctggggcagattgagcaggccgttgtggttccgcataaaggggtagaaggcccccagctgggtccagcgcacacacagctcctctgaggtgttgcccaggaagccgcagacgtcggccccgaccagaggcacccccagcaggttaaactgcaggatttctggcacggaggcggcgagctgctcccaggagctccacacgtcccccatccagtggccggcatatcggccgtggccagcaaaggtcgagcgggagatcacaaatgggcgtgtcccccgagccttcaccagtgccctgtaggaggcaatggcttcagtcaggccgtagaggttgtgcaggttgtagtgtgtagagaggaactggtggctggaggcacagatggtggccgcctggagggtccccccaaccaccccaggcacgtagggtggctcctccagctcattgtgggggcagccgtcctcagagcccctgatgaagttggaaggctcgttcatgtcaatccacatgccgtcgaagggcacctggtcatggaactcagccaccatgtcctcccaccaggccagggctgcggggttggtgaagtcggggaaggcagtggacccaggccacaccttcccgatcagcggctggccggtctcgttggtgatgaaaactctcctccgcagaccctcgtcgtagggtctgtagctcccggcagggcccgagatgctgatggcaggatccacaatcatcacgtagcgccggccgccctggtgcagctcctgcaccatggctgggaagtcccggaagccatccttgttgaacgtgaagtccctccgggagtccatgtagtccaagtcgttccactggacgtccagggggaagtgggccctggtcatgttctccaccacctggcgggtgatggcggtggaggagtagccccagcggcacaggtggaagcccaggccccagtatggcggcatgaacgggtatcccacaacatccaggtactgccgcaccacgctcttgggctccgggcccaggaagatgtacacatccaggatcccacctgtcgacctccagctaagggcagggctcggctgcaggaccacatccatggcattgctattcagcaggaacaccccatgtgccgacccgccatcctccagcgccaggtagaaagggtgagacccgtagaggttcgcaccgggcgtgggcgcgaggtcccggttccacagggtgatcctggtccagctggtgctgagcatcaggggactgaggtgctcggcgagtcctgtgatgtactgcgagggcagcgaggtggacaactgaaggaactggtccgcaaagaagaggggcgccaccgtcgtgttcagcagcacacgaccgtccagctgccggcgcacaatcaccccgaagggctcctcggagaactccacgctgtagagtggggacagtgcccggctggggacacgcggggtctccaagggcacctcgtagcgcttgttagcgggatctttgatcgtgaagtggaggcggttctcagtctccatcatcacgtccagccgcaaggtcaggatgtccttggggaagaaggtgggggtggtacgggtcagggtggccgtgtagcccatttcagaggcactcaggttctccagcttgtagctggggtagctgggtgggaagaagcaccagggctgtcccatctgggctctccgaagttcctgctttgcagggatgtagcagcagccgcgggcctcgcactgttcctgggtgatggccttgtcaggggcacagtcgaagcggctgttaggggggacgtcgcactgtgtgggcactgctctgggacagccggggtgtgcctgggcattctggggccctggcctgctggctccctgctggcgagctgggcgagtctcctccaggaccaaggaggatccactcagctctcggggaaccagcaggaaatcatggagcaggatgtgtcccaggagcacagcggtggccaaggacacaagggcacagacggccagcagccggcgggagcagagcgggtgcctcactcccatggtagatgacccggacagctcctggaggcccgctccgtgcctcagtttccccgtcagctgcggcacgcgcagagcctccctcgctgagcaacgggcggacgaggagaacctaaaggtgtccggggtctttcgcgtcacggaggtcactgtcccacctgctgcctcatccccggcctccacccgcggccccggcgacaacctcagctttcccacctgagaggccgcgcgggcagccgactgccctacccaaccgtccctcgctcagccccggccccgctcacctccgcgcacgcgcgccccggcagcccacggagactccgg

SEQ ID NO: 397 - RNA, 17911 nt, Homo sapiens
  source 1..17911: mol_type = mRNA
acccggcccggctccctccctgcccgtccccgtccccccacccgtgccagcccccaggatgggtgccccgagcgcgtgccggacgctggtgttggctctggcggccatgctcgtggtgccgcaggcagagacccagggccctgtggagccgagctgggagaatgcagggcacaccatggatggcggtgccccgacgtcctcgcccacccggcgcgtgagctttgttccacccgtcactgtcttccccagcctgagccccctgaacccggcgcacaatgggcgggtgtgcagcacctggggtgacttccactacaagaccttcgacggcgacgtcttccgcttccctggcctttgcaactacgtgttctctgagcactgccgcgccgcctacgaggacttcaacgtccagctacgccgaggcctagtgggctccaggcctgtggtcacccgtgttgtcatcaaggcccaggggctggtgctggaggcgtccaacggctccgtcctcatcaatgggcagcgggaggagctgccttacagccgcactggcctcctggtggagcagagcggggactacatcaaggtcagcatccggctggtgctgacattcctgtggaacggagaggacagtgccctgctggagctggatcccaaatacgccaaccagacctgtggcctgtgtggggacttcaacggcctcccggccttcaacgagttctatgcccacaacgccaggctgaccccgctccagtttgggaacctgcagaagttggatgggcccacggagcagtgcccggacccgctgcccttgccggccggcaactgcacggacgaggagggcatctgccaccgcaccctgctggggccggcctttgcggagtgccacgcactggtggacagcactgcgtacctggccgcctgcgcccaggacctgtgccgctgccccacctgcccgtgtgccacctttgtggaatactcacgccagtgcgcccacgcggggggccagccgcggaactggaggtgccctgagctctgcccccggacctgccccctcaacatgcagcaccaggagtgtggctcaccctgcacggacacctgctccaacccccagcgcgcgcagctctgcgaggaccactgtgtggacggctgcttctgccccccaggcacggtgctggatgacatcacgcactctggctgcctgcccctcgggcagtgcccctgcacccacggcggccgcacctacagcccgggcacctccttcaacaccacctgcagctcctgcacctgctccggggggctatggcagtgccaggacctgccgtgccctggcacctgctctgtgcagggcggggcccacatctccacctatgatgagaaactctacgacctgcatggtgactgcagctacgttctgtccaagaaatgtgccgacagcagcttcaccgtgctggctgagctgcggaagtgcggcctgacggacaacgagaactgcctgaaagcggtgacgctcagcctggacggcggggacacggccatccgggtccaagcggacggcggcgtgttcctcaactccatctacacgcagctgcccctgtcggcagccaacatcaccctgttcacaccctcgagcttcttcatcgtggtgcagacaggcctggggctgcagctgctggtgcagctggtgccactcatgcaggtgtttgtcaggctggaccccgcccaccagggccagatgtgcggcctgtgtgggaacttcaaccagaaccaggctgacgacttcacggccctcagcggggtggtggaggccacgggcgcagccttcgccaacacctggaaggcccaggctgcctgtgccaatgccaggaacagctttgaggacccctgctccctcagtgtggagaatgagaactacgcccggcactggtgctcgcgcctgaccgatcccaacagtgccttctcgcgctgccactccatcatcaaccccaagcccttccactcgaactgcatgtttgacacctgcaactgtgagcggagcgaggactgcctgtgcgccgcgctgtcctcctatgtgcacgcctgtgccgccaagggcgtacagctcagcgactggagggacggcgtctgcaccaagtacatgcagaactgccccaagtcccagcgctacgcctacgtggtggatgcctgccagcccacttgccgcggcctgagtgaggccgacgtcacctgcagcgtttccttcgtgcctgtggacggctgcacctgccccgcgggcaccttcctcaatgacgcgggcgcctgtgtgcccgcccaggagtgcccctgctacgctcacggcaccgtgctggctcctggagaggtggtgcacgacgagggcgccgtgtgttcatgtacgggtgggaagctaagctgcctgggagcctctctgcagaaaagcacagggtgtgcagcccccatggtgtacctggactgcagcaacagctcggcgggcacccctggggccgagtgcctccggagctgccacacgctggacgtgggctgtttcagcacacactgcgtgtccggctgtgtctgtcccccggggctggtgtcggatgggagtgggggctgcattgccgaggaggactgcccctgtgtgcacaacgaggccacctacaagcctggagagaccatcagggtcgactgcaacacctgcacctgcaggaaccggaggtgggagtgcagccaccggctctgcctgggcacctgcgtggcctacggggatggccacttcatcacctttgatggcgatcgctacagctttgaaggcagctgcgagtacatcttggcccaggactactgtggggacaacaccacccacgggaccttccgcatcgtcaccgagaacatcccctgtgggaccaccggcaccacctgctccaaggccatcaagctcttcgtggagagctacgagctgatcctccaagaggggacctttaaggcggtggcgagagggccgggtggggacccaccctacaagatacgctacatggggatcttcctggtcatcgagacccacgggatggccgtgtcctgggaccggaagaccagcgtgttcatccgactgcaccaggactacaagggcagggtctgcggcctgtgcgggaacttcgacgacaatgccatcaatgactttgccacgcgtagccggtccgtggtgggggacgcactggagtttgggaacagctggaagctctccccctcctgcccggacgccctggcacccaaggacccctgcacggccaaccccttccgcaagtcctgggcccagaagcagtgcagcatcctccacggccccaccttcgccgcctgccgctcccaggttgactccaccaagtactacgaggcctgcgtgaacgacgcgtgtgcctgcgactcgggtggcgactgcgagtgtttctgcacggctgtggctgcctacgcccaggcctgccacgacgcgggcctgtgtgtgtcctggcggactccggacacctgccccttgttctgtgacttctacaacccacatgggggctgtgagtggcactaccagccctgcggggcaccctgcctaaaaacctgccggaaccccagtgggcactgcctggtggacctgcctggcctggaaggctgctacccgaagtgcccacccagccagcccttcttcaatgaggaccagatgaagtgcgtggcccagtgtggctgctacgacaaggacggaaactactatgacgtcggtgcaagggtccccacagcggagaactgccagagctgtaactgcacacccagtggcatccagtgcgctcacagccttgaggcctgcacctgcacctatgaggacaggacctacagctaccaggacgtcatctacaacaccaccgatgggcttggcgcctgcttgatcgccatctgcggaagcaacggcaccatcatcaggaaggctgtggcatgtcctggaactccagccacaacgccattcaccttcaccaccgcctgggtcccccactccacgacaagcccggccctcccggtctccaccgtgtgtgtccgcgaggtctgccgctggtccagctggtacaatgggcaccgcccagagcccggcctgggaggcggagactttgagacgtttgaaaacctgaggcagagagggtaccaggtatgccctgtgctggctgacatcgagtgccgggcggcgcagcttcccgacatgccgctggaggagctgggccagcaggtggactgtgaccgcatgcgggggctgatgtgcgccaacagccaacagagtcccccgctctgtcacgactacgagctgcgggttctctgctgcgaatacgtgccctgtggcccctccccggccccaggcaccagccctcagccctccctcagtgccagcacggagcctgctgtgcctaccccaacccagaccacagcaaccgaaaagaccaccctatgggtgaccccgagcatccggtcgacggcggccctcacctcgcagactgggtccagctcaggccccgtgacggtcaccccctcggccccaggtaccaccacctgccagccccggtgtcagtggacagagtggtttgatgaggactaccccaagtctgaacaacttggaggggacgttgagtcctacgataagatcagggccgctggagggcacttatgccagcagcctaaggacatagagtgccaggccgagagcttccccaactggaccctggcacaggtggggcagaaggtgcactgtgacgtccacttcggcctggtgtgcaggaactgggagcaggagggcgtcttcaagatgtgctacaactacaggatccgggtcctctgctgcagtgacgaccactgcaggggacgtgccacaaccccgccaccgaccacagagctggagacggccaccaccaccaccacccaggccctgttctcaacgccgcagcctacgagtagcccggggctgaccagggctcccccggccagcaccacagcagtccccaccctctcagaaggactgacatcccccagatacacaagcacccttggtacagccaccacgggaggccccacgacgcctgcaggctccacagaacccactgtcccaggggtggccacatccacccttccaacacgctcagcccttccagggacgacggggagcttgggcacatggcgcccctcacagccacccacgctggccccaacaacaatggcaacctccagagctcgcccgacaggcacagccagcaccgcttccaaagagccgctgaccacgagcctggcgccaacactcacgagcgagctgtccacctctcaggccgagaccagcacgcccaggacagagacgacaatgagccccttgactaacaccaccaccagccagggcacgacccgctgtcaaccgaagtgtgagtggacagagtggtttgacgtggacttcccaacctcaggggttgcaggcggggacatggaaacttttgaaaacatcagggctgctgggggcaagatgtgctgggcaccaaagagcatagagtgccgggcggagaactaccccgaggtaagcatcgaccaggtcgggcaggtgctgacctgcagcctggagacggggctgacctgcaagaacgaagaccagacaggcaggttcaacatgtgcttcaactacaacgtgcgtgtgctttgctgtgacgactacagccactgccccagtaccccagccaccagctccacggccacgccctcctcaactccggggacgacctggatcctcacaaagccgaccacaacagccactacgactgcgtccactggatccacggccaccccgacctccaccctgagaacagctccccctcccaaagtgctgaccaccacggccaccacacccacagtcaccagctccaaagccactccctcctccagtccagggactgcaaccgcccttccagcactgagaagcacagccaccacacccacagctaccagcgttacacccatcccctcttcctccctgggcaccacctggacccgcctatcacagaccaccacacccacggccaccatgtccacagccacaccctcctccactccagagactgcccacacctccacagtgcttaccgccacggccaccacaactggggccaccggctctgtggccaccccctcctccaccccaggaacagctcacactaccaaagtgccaactaccacaaccacgggcttcacagccaccccctcctccagcccagggacggcactcacgcctccagtgtggatcagcacaaccaccacacccacaaccagaggctccacggtgaccccctcctccatcccggggaccacccacaccgccacagtgctgaccaccaccaccacaactgtggccactggttctatggcaacaccctcctctagcacacagaccagtggtactcccccatcactgaccaccacggccactacgatcacggccaccggctccaccaccaacccctcctcaactcctgggacaactcccatccccccagtgctgaccaccaccgccaccacacctgcagccaccagcaacacagtgactccctcctctgccctagggaccacccacacacccccagtgccgaacaccatggccaccacacacgggcgatccctgccccccagcagtccccacacggtgcgcacagcctggacttcggccacctcgggcatcttgggcaccacccacatcacagagccttccacggtgacttcccacaccctagcagcaaccaccggtaccacccagcactcgactccagccctttccagccctcaccctagcagcagaaccaccgagtcacccccttctccagggacgaccaccccgggccacaccacggccacctccaggaccacagccacggccacacccagcaagacccgcacctcgaccctgctgcccagcagccccacatcggcccccataaccacggtggtgaccatgggctgtgagccccagtgtgcctggtcagagtggctggactacagctaccccatgccggggccctctggcggggactttgacacctactccaacatccgtgcggccggaggggccgtctgtgagcagcccctgggcctcgagtgccgtgcccaggcccagcctggtgtccccctgcgggagttgggccaggtcgtggaatgcagcctggactttggcctggtctgcaggaaccgtgagcaggtggggaagttcaagatgtgcttcaactatgaaatccgtgtgttctgctgcaactacggccactgccccagcaccccggccaccagctctacggccatgccctcctccactccggggacgacctggatcctcacagagctgaccacaacagccactacgactgagtccactggatccacggccaccccgtcctccaccccagggaccacctggatcctcacagagccgagcactacagccaccgtgacggtgcccaccggatccacggccaccgcctcctccacccaggcaactgctggcaccccacatgtgagcaccacggccacgacacccacagtcaccagctccaaagccactcccttctccagtccagggactgcaaccgcccttccagcactgagaagcacagccaccacacccacagctaccagctttacagccatcccctcctcctccctgggcaccacctggacccgcctatcacagaccaccacacccacggccaccatgtccacagccacaccctcctccactccagagactgtccacacctccacagtgcttaccaccacggccaccacaaccggggccaccggctctgtggccaccccctcctccaccccaggaacagctcacactaccaaagtgctgactaccacaaccacgggcttcacagccaccccctcctccagcccagggacggcacgcacgcttccagtgtggatcagcacaaccaccacacccacaaccagaggttccacggtgaccccctcctccatcccggggaccacccacacccccacagtgctgaccaccaccaccacaactgtggccactggttctatggcaacaccctcctctagcacacagaccagtggtactcccccatcactgaccaccacggccactacgatcacggccaccggctccaccaccaacccctcctcaactccagggacaacacctatccccccagtgctgaccaccaccgccaccacacctgcagccaccagcagcacagtgactccctcctctgccctagggaccacccacacacccccagtgccgaacaccacggccaccacacacgggcgatccctgtcccccagcagtccccacacggtgcgcacagcctggacttcggccacctcaggcaccttgggcaccacccacatcacagagccttccacggggacttcccacaccccagcagcaaccaccggtaccacccagcactcgactccagccctgtccagccctcaccctagcagcaggaccaccgagtcacccccttctccagggacgaccaccccgggccacaccagggccacctccaggaccacggccacggccacacccagcaagacccgcacctcgaccctgctgcccagcagccccacatcggccccaataaccacggtggtgaccatgggctgtgagccccagtgtgcctggtcagagtggctggactacagctaccccatgccggggccctctggcggggactttgacacctactccaacatccgtgcggccggaggggccgtctgtgagcagcccctgggcctcgagtgccgtgcccaggcccagcctggtgtccccctgcgggagttgggccaggtcgtggaatgcagcctggactttggcctggtctgcaggaaccgtgagcaggtggggaagttcaagatgtgcttcaactatgaaatccgtgtgttctgctgcaactacggccactgccccagcaccccggccaccagctctacggccacgccctcctccactccagggacgacctggatcctcacagagcagaccacagcagccactacgaccgcaaccactggatccacggccatcccgtcctccaccccgggaacagctccccctcccaaagtgctgaccagcacggccaccacacccacagccaccagttccaaagccacttcctcctccagtccaaggactgcaaccacccttccagtgctgacaagcacagccaccaaatccacagctaccagctttacacccatcccctccttcacccttgggaccaccgggaccctcccagaacagaccaccacacccatggccaccatgtccacaatccacccctcctccactccggagaccacccacacctccacagtgctgaccacgaaggccaccacgacaagggccaccagttccatgtccaccccctcctccactccggggacgacctggatcctcacagagctgaccacagcagccactacaactgcagccactggccccacggccaccccgtcctccaccccagggaccacctggatcctcacagagcccagcactacagccaccgtgacggtgcccaccggatccacggccaccgcctcctccacccgggcaactgctggcaccctcaaagtgctgaccagcacggccaccacacccacagtcatcagctccagagccactccctcctccagtccagggactgcaaccgcccttccagcactgagaagcacagccaccacacccacagctaccagcgttacagccatcccctcttcctccctgggcaccgcctggacccgcctatcacagaccaccacacccacggccaccatgtccacagccacaccctcctctactccagagactgtccacacctccacagtgcttaccaccacgaccaccacaaccagggccaccggctctgtggccaccccctcctccaccccaggaacagctcacactaccaaagtgccgactaccacaaccacgggcttcacagccaccccctcctccagcccagggacggcactcacgcctccagtgtggatcagcacaaccaccacacccacaaccagaggctccacggtgaccccctcctccatcccggggaccacccacaccgccacagtgctgaccaccaccaccacaactgtggccactggttctatggcaacaccctcctctagcacacagaccagtggtactcccccatcactgaccaccacggccactacgatcacagccaccggctccaccaccaacccctcctcaactccagggacaactcccatccccccagtgctgaccaccaccgccaccacacctgcagccaccagcagcacagtgactccctcctctgccctagggaccacccacacacccccagtgccgaacaccacggccaccacacacgggcggtccctgccccccagcagtccccacacggtgcgcacagcctggacttcggccacctcgggcatcttgggcaccacccacatcacagagccttccacggtgacttcccacaccccagcagcaaccaccagtaccacccagcactcgactccagccctgtccagccctcaccctagcagcaggaccaccgagtcacccccttctccagggacgaccaccccgggccacaccaggggcacctccaggaccacagccacagccacacccagcaagacccgcacctcgaccctgctgcccagcagccccacatcggcccccataaccacggtggtgaccacgggctgtgagccccagtgtgcctggtcagagtggctggactacagctaccccatgccggggccctctggcggggactttgacacctactccaacatccgtgcggccggaggggcagtctgtgagcagcccctgggcctcgagtgccgtgcccaggcccagcctggtgtccccctgcgggagttgggccaggtcgtggaatgcagcctggactttggcctggtctgcaggaaccgtgagcaggtggggaagttcaagatgtgcttcaactatgaaatccgtgtgttctgctgcaactacggccactgccccagcaccccggccaccagctctacggccacgccctcctcaactccggggacgacctggatcctcacaaagctgaccacaacagccactacgactgagtccactggatccacggccaccccgtcctccaccccagggaccacctggatcctcacagagccgagcactacagccaccgtgacggtgcccaccggatccacggccaccgcctcctccacccaggcaactgctggcaccccacatgtgagcaccacggccacgacacccacagtcaccagctccaaagccactcccttctccagtccagggactgcaaccgcccttccagcactgagaagcacagccaccacacccacagctaccagctttacagccatcccctcctcctccctgggcaccacctggacccgcctatcacagaccaccacacccacggccaccatgtccacagccacaccctcctccactccagagactgcccacacctccacagtgcttaccaccacggccaccacaaccagggccaccggctctgtggccaccccctcttccaccccaggaacagctcacactaccaaagtgccgactaccacaaccacgggcttcacagtcaccccctcctccagcccagggacggcacgcacgcctccagtgtggatcagcacaaccaccacacccacaaccagtggctccacggtgaccccctcctccgtcccggggaccacccacacccccacagtgctgaccaccaccaccacaactgtggccactggttctatggcaacaccctcctctagcacacagaccagtggtactcccccatcactgatcaccacggccactacgatcacggccaccggctccaccaccaacccctcctcaactccagggacaacacctatccccccagtgctgaccaccaccgccaccacacctgcagccaccagcagcacagtgactccctcctctgccctagggaccacccacacacccccagtgccgaacaccacggccaccacacacgggcgatccctgtcccccagcagtccccacacggtgcgcacagcctggacttcggccacctcaggcaccttgggcaccacccacatcacagagccttccacggggacttcccacaccccagcagcaaccaccggtaccacccagcactcgactccagccctgtccagccctcaccctagcagcaggaccaccgagtcacccccttccccagggacgaccaccccgggccacaccacggccacctccaggaccacggccacggccacacccagcaagacccgcacctcgaccctgctgcccagcagccccacatcggcccccataaccacggtggtgaccacgggctgtgagccccagtgtgcctggtcagagtggctggactacagctaccccatgccggggccctctggcggggactttgacacctactccaacatccgtgcggccggaggggccgtctgtgagcagcccctgggcctcgagtgccgtgcccaggcccagcctggtgtccccctgggggagttgggccaggtcgtggaatgcagcctggactttggcctggtctgcaggaaccgtgagcaggtggggaagttcaagatgtgcttcaactatgaaatccgtgtgttctgctgcaactacggccactgccccagcaccccggccaccagctctacggccatgccctcctccactccggggacgacctggatcctcacagagctgaccacaacagccactacgactgcatccactggatccacggccaccccgtcctccaccccgggaacagctccccctcccaaagtgctgaccagcccggccaccacacccacagccaccagttccaaagccacttcctcctccagtccaaggactgcaaccacccttccagtgctgacaagcacagccaccaaatccacagctaccagcgttacacccatcccctcctccacccttgggaccaccgggaccctcccagaacagaccaccacacccgtggccaccatgtccacaatccacccctcctccactccggagaccacccacacctccacagtgctgaccacgaaggccaccacgacaagggccaccagttccacgtccaccccctcctccactccggggacgacctggatcctcacagagctgaccacagcagccactacaactgcagccactggccccacggccaccccgtcctccaccccagggaccacctggatcctcacagagctgaccacaacagccactacgactgcgtccactggatccacggccaccccgtcctccaccccagggaccacctggatcctcacagagccgagcactacagccaccgtgacggtgcccaccggatccacggccaccgcctcctccacccaggcaactgctggcaccccacatgtgagcaccacggccacgacacccacagtcaccagctccaaagccactccctcctccagtccagggactgcaactgcccttccagcactgagaagcacagccaccacacccacagctaccagctttacagccatcccctcctcctccctgggcaccacctggacccgcctatcacagaccaccacacccacggccaccatgtccacagccacaccctcctccactccagagactgtccacacctccacagtgcttaccgccacggccaccacaaccggggccaccggctctgtggccaccccctcctccaccccaggaacagctcacactaccaaagtgccgactaccacaaccacgggcttcacagccaccccctcctccagcccagggacggcactcacgcctccagtgtggatcagcacaaccaccacacccacaaccaccacacccacaaccagtggctccacggtgaccccctcctccatcccggggaccacccacaccgccagagtgctgaccaccaccaccacaactgtggccactggttctatggcaacaccctcctctagcacacagaccagtggtactcccccatcactgaccaccacggccactacgatcacggccaccggctccaccaccaacccctcctcaactccagggacaacacccatcaccccagtgctgaccagcacggccaccacacccgcagccaccagctccaaagccacttcctcctccagtccaaggactgcaaccacccttccagtgctgacaagcacagccacaaaatccacagctaccagctttacacccatcccctcctccaccctgtggaccacgtggaccgtcccagcacagaccaccacacccatgtccaccatgtccacaatccacacctcctctactccagagaccacccacacctccacagtgctgaccaccacagccaccatgacaagggccaccaattccacggccacaccctcctccactctggggacgacccggatcctcactgagctgaccacaacagccactacaactgcagccactggatccacggccaccctgtcctccaccccagggaccacctggatcctcacagagccgagcactatagccaccgtgatggtgcccaccggttccacggccaccgcctcctccactctgggaacagctcacacccccaaagtggtgaccaccatggccactatgcccacagccactgcctccacggttcccagctcgtccaccgtggggaccacccgcacccctgcagtgctccccagcagcctgccaaccttcagcgtgtccactgtgtcctcctcagtcctcaccaccctgagacccactggcttccccagctcccacttctctactccctgcttctgcagggcatttggacagtttttctcgcccggggaagtcatctacaataagaccgaccgagccggctgccatttctacgcagtgtgcaatcagcactgtgacattgaccgcttccagggcgcctgtcccacctccccaccgccagtgtcctccgccccgctgtcctcgccctcccctgcccctggctgtgacaatgccatccctctccggcaggtgaatgagacctggaccctggagaactgcacggtggccaggtgcgtgggtgacaaccgtgtcgtcctgctggacccaaagcctgtggccaacgtcacctgcgtgaacaagcacctgcccatcaaagtgtcggacccgagccagccctgtgacttccactatgagtgcgagtgcatctgcagcatgtggggcggctcccactattccacctttgacggcacctcttacaccttccggggcaactgcacctatgtcctcatgagagagatccatgcacgctttgggaatctcagcctctacctggacaaccactactgcacggcctctgccactgccgctgccgcccgctgcccccgcgccctcagcatccactacaagtccatggatatcgtcctcactgtcaccatggtgcatgggaaggaggagggcctgatcctgtttgaccaaattccggtgagcagcggtttcagcaagaacggcgtgcttgtgtctgtgctggggaccaccaccatgcgtgtggacattcctgccctgggcgtgagcgtcaccttcaatggccaagtcttccaggcccggctgccctacagcctcttccacaacaacaccgagggccagtgcggcacctgcaccaacaaccagagggacgactgtctccagcgggacggaaccactgccgccagttgcaaggacatggccaagacgtggctggtccccgacagcagaaaggatggctgctgggccccgactggcacaccccccactgccagccccgcagccccggtgtctagcacacccacccccaccccatgcccaccacagccgctctgtgatctgatgctgagccaggtctttgctgagtgccacaaccttgtgcccccgggcccattcttcaacgcctgcatcagcgaccactgcaggggccgccttgaggtgccctgccagagcctggaggcttacgcagagctctgccgcgcccggggagtgtgcagtgactggcgaggtgcaaccggtggcctgtgcgacctcacctgcccacccaccaaagtgtacaagccatgcggccccatacagcctgccacctgcaactctaggaaccagagcccacagctggaggggatggcggagggctgcttctgccctgaggaccagatcctcttcaacgcacacatgggcatctgcgtgcaggcctgcccctgcgtgggacccgatgggtttcctaaatttcccggggagcggtgggtcagcaactgccagtcctgcgtgtgtgacgagggttcagtgtcggtgcagtgcaagcccctgccctgtgacgcccagggtcagcccccgccgtgcaaccgtcccggcttcgtaaccgtgaccaggccccgggccgagaacccctgctgccccgagacggtgtgcgtgtgcaacacaaccacctgcccccagagcctgcctgtgtgcccgccagggcaggagtccatctgcacccaggaggagggcgactgctgtcccaccttccgctgcagacctcagctgtgttcgtacaatggcaccttctacggggttggtgcaaccttcccaggcgcccttccctgccacatgtgtacctgcctctctggggacacccaggacccaacggtgcaatgtcaggaggatgcctgcaacaatactacctgtccccagggctttgagtacaagagagtggccgggcagtgctgtggggagtgcgtccagaccgcctgcctcacgcccgatggccagccagtccagctgaatgaaacctgggtcaacagccatgtggacaactgcaccgtgtacctctgtgaggctgagggtggagtccatttgctgaccccacagcctgcatcctgcccagatgtgtccagctgcagggggagcctcaggaaaaccggctgctgctactcctgtgaggaggactcctgtcaagtccgcatcaacacgaccatcctgtggcaccagggctgcgagaccgaggtcaacatcaccttctgcgagggctcctgccccggagcgtccaagtactcagcagaggcccaggccatgcagcaccagtgcacctgctgccaggagaggcgggtccacgaggagacggtgcccttgcactgtcctaacggctcagccatcctgcacacctacacccacgtggatgagtgtggctgcacgcccttctgtgtccctgcgcccatggctcccccacacacccgtggcttcccggcccaggaggccactgctgtctgagaacgttctgcctccatccccatgctctgtccacctggagccaggatgtgcattgtctgatcatgaaaaccttgggcctcctctgcggagccccccggcctgtgtgtggcaccccgcgctccgtgctcctgctgcccaccccgtgggtgaaaccggccccagaagggtgaggggccagcaggacccctttcgggagggcgccactcaggagtcctaccctgggagagcctgtggcccaccttggccttgcccctccctgatgtcactgggacgccctggaacaaactaagcatgtgcgggcctatgtgtccctgccacggccggagcgcccgcgcagcacggattccagctggccacgtccggccgctggggcagacaggctggtccaggcaaggccagctgctgccaggaagctgcgacaggcaaggcggccgcctgtccatgcctgctgcagggtaactcagggctgaggtcgcaacggccaggtcagagaggggtcagcatcccaaagccccctctgctcaacccagcccagttttgcaaataaaccctgagcattgagta

SEQ ID NO: 398 - RNA, 17911 nt, Homo sapiens
  source 1..17911: mol_type = mRNA
tactcaatgctcagggtttatttgcaaaactgggctgggttgagcagagggggctttgggatgctgacccctctctgacctggccgttgcgacctcagccctgagttaccctgcagcaggcatggacaggcggccgccttgcctgtcgcagcttcctggcagcagctggccttgcctggaccagcctgtctgccccagcggccggacgtggccagctggaatccgtgctgcgcgggcgctccggccgtggcagggacacataggcccgcacatgcttagtttgttccagggcgtcccagtgacatcagggaggggcaaggccaaggtgggccacaggctctcccagggtaggactcctgagtggcgccctcccgaaaggggtcctgctggcccctcacccttctggggccggtttcacccacggggtgggcagcaggagcacggagcgcggggtgccacacacaggccggggggctccgcagaggaggcccaaggttttcatgatcagacaatgcacatcctggctccaggtggacagagcatggggatggaggcagaacgttctcagacagcagtggcctcctgggccgggaagccacgggtgtgtgggggagccatgggcgcagggacacagaagggcgtgcagccacactcatccacgtgggtgtaggtgtgcaggatggctgagccgttaggacagtgcaagggcaccgtctcctcgtggacccgcctctcctggcagcaggtgcactggtgctgcatggcctgggcctctgctgagtacttggacgctccggggcaggagccctcgcagaaggtgatgttgacctcggtctcgcagccctggtgccacaggatggtcgtgttgatgcggacttgacaggagtcctcctcacaggagtagcagcagccggttttcctgaggctccccctgcagctggacacatctgggcaggatgcaggctgtggggtcagcaaatggactccaccctcagcctcacagaggtacacggtgcagttgtccacatggctgttgacccaggtttcattcagctggactggctggccatcgggcgtgaggcaggcggtctggacgcactccccacagcactgcccggccactctcttgtactcaaagccctggggacaggtagtattgttgcaggcatcctcctgacattgcaccgttgggtcctgggtgtccccagagaggcaggtacacatgtggcagggaagggcgcctgggaaggttgcaccaaccccgtagaaggtgccattgtacgaacacagctgaggtctgcagcggaaggtgggacagcagtcgccctcctcctgggtgcagatggactcctgccctggcgggcacacaggcaggctctgggggcaggtggttgtgttgcacacgcacaccgtctcggggcagcaggggttctcggcccggggcctggtcacggttacgaagccgggacggttgcacggcgggggctgaccctgggcgtcacagggcaggggcttgcactgcaccgacactgaaccctcgtcacacacgcaggactggcagttgctgacccaccgctccccgggaaatttaggaaacccatcgggtcccacgcaggggcaggcctgcacgcagatgcccatgtgtgcgttgaagaggatctggtcctcagggcagaagcagccctccgccatcccctccagctgtgggctctggttcctagagttgcaggtggcaggctgtatggggccgcatggcttgtacactttggtgggtgggcaggtgaggtcgcacaggccaccggttgcacctcgccagtcactgcacactccccgggcgcggcagagctctgcgtaagcctccaggctctggcagggcacctcaaggcggcccctgcagtggtcgctgatgcaggcgttgaagaatgggcccgggggcacaaggttgtggcactcagcaaagacctggctcagcatcagatcacagagcggctgtggtgggcatggggtgggggtgggtgtgctagacaccggggctgcggggctggcagtggggggtgtgccagtcggggcccagcagccatcctttctgctgtcggggaccagccacgtcttggccatgtccttgcaactggcggcagtggttccgtcccgctggagacagtcgtccctctggttgttggtgcaggtgccgcactggccctcggtgttgttgtggaagaggctgtagggcagccgggcctggaagacttggccattgaaggtgacgctcacgcccagggcaggaatgtccacacgcatggtggtggtccccagcacagacacaagcacgccgttcttgctgaaaccgctgctcaccggaatttggtcaaacaggatcaggccctcctccttcccatgcaccatggtgacagtgaggacgatatccatggacttgtagtggatgctgagggcgcgggggcagcgggcggcagcggcagtggcagaggccgtgcagtagtggttgtccaggtagaggctgagattcccaaagcgtgcatggatctctctcatgaggacataggtgcagttgccccggaaggtgtaagaggtgccgtcaaaggtggaatagtgggagccgccccacatgctgcagatgcactcgcactcatagtggaagtcacagggctggctcgggtccgacactttgatgggcaggtgcttgttcacgcaggtgacgttggccacaggctttgggtccagcaggacgacacggttgtcacccacgcacctggccaccgtgcagttctccagggtccaggtctcattcacctgccggagagggatggcattgtcacagccaggggcaggggagggcgaggacagcggggcggaggacactggcggtggggaggtgggacaggcgccctggaagcggtcaatgtcacagtgctgattgcacactgcgtagaaatggcagccggctcggtcggtcttattgtagatgacttccccgggcgagaaaaactgtccaaatgccctgcagaagcagggagtagagaagtgggagctggggaagccagtgggtctcagggtggtgaggactgaggaggacacagtggacacgctgaaggttggcaggctgctggggagcactgcaggggtgcgggtggtccccacggtggacgagctgggaaccgtggaggcagtggctgtgggcatagtggccatggtggtcaccactttgggggtgtgagctgttcccagagtggaggaggcggtggccgtggaaccggtgggcaccatcacggtggctatagtgctcggctctgtgaggatccaggtggtccctggggtggaggacagggtggccgtggatccagtggctgcagttgtagtggctgttgtggtcagctcagtgaggatccgggtcgtccccagagtggaggagggtgtggccgtggaattggtggcccttgtcatggtggctgtggtggtcagcactgtggaggtgtgggtggtctctggagtagaggaggtgtggattgtggacatggtggacatgggtgtggtggtctgtgctgggacggtccacgtggtccacagggtggaggaggggatgggtgtaaagctggtagctgtggattttgtggctgtgcttgtcagcactggaagggtggttgcagtccttggactggaggaggaagtggctttggagctggtggctgcgggtgtggtggccgtgctggtcagcactggggtgatgggtgttgtccctggagttgaggaggggttggtggtggagccggtggccgtgatcgtagtggccgtggtggtcagtgatgggggagtaccactggtctgtgtgctagaggagggtgttgccatagaaccagtggccacagttgtggtggtggtggtcagcactctggcggtgtgggtggtccccgggatggaggagggggtcaccgtggagccactggttgtgggtgtggtggttgtgggtgtggtggttgtgctgatccacactggaggcgtgagtgccgtccctgggctggaggagggggtggctgtgaagcccgtggttgtggtagtcggcactttggtagtgtgagctgttcctggggtggaggagggggtggccacagagccggtggccccggttgtggtggccgtggcggtaagcactgtggaggtgtggacagtctctggagtggaggagggtgtggctgtggacatggtggccgtgggtgtggtggtctgtgataggcgggtccaggtggtgcccagggaggaggaggggatggctgtaaagctggtagctgtgggtgtggtggctgtgcttctcagtgctggaagggcagttgcagtccctggactggaggagggagtggctttggagctggtgactgtgggtgtcgtggccgtggtgctcacatgtggggtgccagcagttgcctgggtggaggaggcggtggccgtggatccggtgggcaccgtcacggtggctgtagtgctcggctctgtgaggatccaggtggtccctggggtggaggacggggtggccgtggatccagtggacgcagtcgtagtggctgttgtggtcagctctgtgaggatccaggtggtccctggggtggaggacggggtggccgtggggccagtggctgcagttgtagtggctgctgtggtcagctctgtgaggatccaggtcgtccccggagtggaggagggggtggacgtggaactggtggcccttgtcgtggtggccttcgtggtcagcactgtggaggtgtgggtggtctccggagtggaggaggggtggattgtggacatggtggccacgggtgtggtggtctgttctgggagggtcccggtggtcccaagggtggaggaggggatgggtgtaacgctggtagctgtggatttggtggctgtgcttgtcagcactggaagggtggttgcagtccttggactggaggaggaagtggctttggaactggtggctgtgggtgtggtggccgggctggtcagcactttgggagggggagctgttcccggggtggaggacggggtggccgtggatccagtggatgcagtcgtagtggctgttgtggtcagctctgtgaggatccaggtcgtccccggagtggaggagggcatggccgtagagctggtggccggggtgctggggcagtggccgtagttgcagcagaacacacggatttcatagttgaagcacatcttgaacttccccacctgctcacggttcctgcagaccaggccaaagtccaggctgcattccacgacctggcccaactcccccagggggacaccaggctgggcctgggcacggcactcgaggcccaggggctgctcacagacggcccctccggccgcacggatgttggagtaggtgtcaaagtccccgccagagggccccggcatggggtagctgtagtccagccactctgaccaggcacactggggctcacagcccgtggtcaccaccgtggttatgggggccgatgtggggctgctgggcagcagggtcgaggtgcgggtcttgctgggtgtggccgtggccgtggtcctggaggtggccgtggtgtggcccggggtggtcgtccctggggaagggggtgactcggtggtcctgctgctagggtgagggctggacagggctggagtcgagtgctgggtggtaccggtggttgctgctggggtgtgggaagtccccgtggaaggctctgtgatgtgggtggtgcccaaggtgcctgaggtggccgaagtccaggctgtgcgcaccgtgtggggactgctgggggacagggatcgcccgtgtgtggtggccgtggtgttcggcactgggggtgtgtgggtggtccctagggcagaggagggagtcactgtgctgctggtggctgcaggtgtggtggcggtggtggtcagcactggggggataggtgttgtccctggagttgaggaggggttggtggtggagccggtggccgtgatcgtagtggccgtggtgatcagtgatgggggagtaccactggtctgtgtgctagaggagggtgttgccatagaaccagtggccacagttgtggtggtggtggtcagcactgtgggggtgtgggtggtccccgggacggaggagggggtcaccgtggagccactggttgtgggtgtggtggttgtgctgatccacactggaggcgtgcgtgccgtccctgggctggaggagggggtgactgtgaagcccgtggttgtggtagtcggcactttggtagtgtgagctgttcctggggtggaagagggggtggccacagagccggtggccctggttgtggtggccgtggtggtaagcactgtggaggtgtgggcagtctctggagtggaggagggtgtggctgtggacatggtggccgtgggtgtggtggtctgtgataggcgggtccaggtggtgcccagggaggaggaggggatggctgtaaagctggtagctgtgggtgtggtggctgtgcttctcagtgctggaagggcggttgcagtccctggactggagaagggagtggctttggagctggtgactgtgggtgtcgtggccgtggtgctcacatgtggggtgccagcagttgcctgggtggaggaggcggtggccgtggatccggtgggcaccgtcacggtggctgtagtgctcggctctgtgaggatccaggtggtccctggggtggaggacggggtggccgtggatccagtggactcagtcgtagtggctgttgtggtcagctttgtgaggatccaggtcgtccccggagttgaggagggcgtggccgtagagctggtggccggggtgctggggcagtggccgtagttgcagcagaacacacggatttcatagttgaagcacatcttgaacttccccacctgctcacggttcctgcagaccaggccaaagtccaggctgcattccacgacctggcccaactcccgcagggggacaccaggctgggcctgggcacggcactcgaggcccaggggctgctcacagactgcccctccggccgcacggatgttggagtaggtgtcaaagtccccgccagagggccccggcatggggtagctgtagtccagccactctgaccaggcacactggggctcacagcccgtggtcaccaccgtggttatgggggccgatgtggggctgctgggcagcagggtcgaggtgcgggtcttgctgggtgtggctgtggctgtggtcctggaggtgcccctggtgtggcccggggtggtcgtccctggagaagggggtgactcggtggtcctgctgctagggtgagggctggacagggctggagtcgagtgctgggtggtactggtggttgctgctggggtgtgggaagtcaccgtggaaggctctgtgatgtgggtggtgcccaagatgcccgaggtggccgaagtccaggctgtgcgcaccgtgtggggactgctggggggcagggaccgcccgtgtgtggtggccgtggtgttcggcactgggggtgtgtgggtggtccctagggcagaggagggagtcactgtgctgctggtggctgcaggtgtggtggcggtggtggtcagcactggggggatgggagttgtccctggagttgaggaggggttggtggtggagccggtggctgtgatcgtagtggccgtggtggtcagtgatgggggagtaccactggtctgtgtgctagaggagggtgttgccatagaaccagtggccacagttgtggtggtggtggtcagcactgtggcggtgtgggtggtccccgggatggaggagggggtcaccgtggagcctctggttgtgggtgtggtggttgtgctgatccacactggaggcgtgagtgccgtccctgggctggaggagggggtggctgtgaagcccgtggttgtggtagtcggcactttggtagtgtgagctgttcctggggtggaggagggggtggccacagagccggtggccctggttgtggtggtcgtggtggtaagcactgtggaggtgtggacagtctctggagtagaggagggtgtggctgtggacatggtggccgtgggtgtggtggtctgtgataggcgggtccaggcggtgcccagggaggaagaggggatggctgtaacgctggtagctgtgggtgtggtggctgtgcttctcagtgctggaagggcggttgcagtccctggactggaggagggagtggctctggagctgatgactgtgggtgtggtggccgtgctggtcagcactttgagggtgccagcagttgcccgggtggaggaggcggtggccgtggatccggtgggcaccgtcacggtggctgtagtgctgggctctgtgaggatccaggtggtccctggggtggaggacggggtggccgtggggccagtggctgcagttgtagtggctgctgtggtcagctctgtgaggatccaggtcgtccccggagtggaggagggggtggacatggaactggtggcccttgtcgtggtggccttcgtggtcagcactgtggaggtgtgggtggtctccggagtggaggaggggtggattgtggacatggtggccatgggtgtggtggtctgttctgggagggtcccggtggtcccaagggtgaaggaggggatgggtgtaaagctggtagctgtggatttggtggctgtgcttgtcagcactggaagggtggttgcagtccttggactggaggaggaagtggctttggaactggtggctgtgggtgtggtggccgtgctggtcagcactttgggagggggagctgttcccggggtggaggacgggatggccgtggatccagtggttgcggtcgtagtggctgctgtggtctgctctgtgaggatccaggtcgtccctggagtggaggagggcgtggccgtagagctggtggccggggtgctggggcagtggccgtagttgcagcagaacacacggatttcatagttgaagcacatcttgaacttccccacctgctcacggttcctgcagaccaggccaaagtccaggctgcattccacgacctggcccaactcccgcagggggacaccaggctgggcctgggcacggcactcgaggcccaggggctgctcacagacggcccctccggccgcacggatgttggagtaggtgtcaaagtccccgccagagggccccggcatggggtagctgtagtccagccactctgaccaggcacactggggctcacagcccatggtcaccaccgtggttattggggccgatgtggggctgctgggcagcagggtcgaggtgcgggtcttgctgggtgtggccgtggccgtggtcctggaggtggccctggtgtggcccggggtggtcgtccctggagaagggggtgactcggtggtcctgctgctagggtgagggctggacagggctggagtcgagtgctgggtggtaccggtggttgctgctggggtgtgggaagtccccgtggaaggctctgtgatgtgggtggtgcccaaggtgcctgaggtggccgaagtccaggctgtgcgcaccgtgtggggactgctgggggacagggatcgcccgtgtgtggtggccgtggtgttcggcactgggggtgtgtgggtggtccctagggcagaggagggagtcactgtgctgctggtggctgcaggtgtggtggcggtggtggtcagcactggggggataggtgttgtccctggagttgaggaggggttggtggtggagccggtggccgtgatcgtagtggccgtggtggtcagtgatgggggagtaccactggtctgtgtgctagaggagggtgttgccatagaaccagtggccacagttgtggtggtggtggtcagcactgtgggggtgtgggtggtccccgggatggaggagggggtcaccgtggaacctctggttgtgggtgtggtggttgtgctgatccacactggaagcgtgcgtgccgtccctgggctggaggagggggtggctgtgaagcccgtggttgtggtagtcagcactttggtagtgtgagctgttcctggggtggaggagggggtggccacagagccggtggccccggttgtggtggccgtggtggtaagcactgtggaggtgtggacagtctctggagtggaggagggtgtggctgtggacatggtggccgtgggtgtggtggtctgtgataggcgggtccaggtggtgcccagggaggaggaggggatggctgtaaagctggtagctgtgggtgtggtggctgtgcttctcagtgctggaagggcggttgcagtccctggactggagaagggagtggctttggagctggtgactgtgggtgtcgtggccgtggtgctcacatgtggggtgccagcagttgcctgggtggaggaggcggtggccgtggatccggtgggcaccgtcacggtggctgtagtgctcggctctgtgaggatccaggtggtccctggggtggaggacggggtggccgtggatccagtggactcagtcgtagtggctgttgtggtcagctctgtgaggatccaggtcgtccccggagtggaggagggcatggccgtagagctggtggccggggtgctggggcagtggccgtagttgcagcagaacacacggatttcatagttgaagcacatcttgaacttccccacctgctcacggttcctgcagaccaggccaaagtccaggctgcattccacgacctggcccaactcccgcagggggacaccaggctgggcctgggcacggcactcgaggcccaggggctgctcacagacggcccctccggccgcacggatgttggagtaggtgtcaaagtccccgccagagggccccggcatggggtagctgtagtccagccactctgaccaggcacactggggctcacagcccatggtcaccaccgtggttatgggggccgatgtggggctgctgggcagcagggtcgaggtgcgggtcttgctgggtgtggccgtggctgtggtcctggaggtggccgtggtgtggcccggggtggtcgtccctggagaagggggtgactcggtggttctgctgctagggtgagggctggaaagggctggagtcgagtgctgggtggtaccggtggttgctgctagggtgtgggaagtcaccgtggaaggctctgtgatgtgggtggtgcccaagatgcccgaggtggccgaagtccaggctgtgcgcaccgtgtggggactgctggggggcagggatcgcccgtgtgtggtggccatggtgttcggcactgggggtgtgtgggtggtccctagggcagaggagggagtcactgtgttgctggtggctgcaggtgtggtggcggtggtggtcagcactggggggatgggagttgtcccaggagttgaggaggggttggtggtggagccggtggccgtgatcgtagtggccgtggtggtcagtgatgggggagtaccactggtctgtgtgctagaggagggtgttgccatagaaccagtggccacagttgtggtggtggtggtcagcactgtggcggtgtgggtggtccccgggatggaggagggggtcaccgtggagcctctggttgtgggtgtggtggttgtgctgatccacactggaggcgtgagtgccgtccctgggctggaggagggggtggctgtgaagcccgtggttgtggtagttggcactttggtagtgtgagctgttcctggggtggaggagggggtggccacagagccggtggccccagttgtggtggccgtggcggtaagcactgtggaggtgtgggcagtctctggagtggaggagggtgtggctgtggacatggtggccgtgggtgtggtggtctgtgataggcgggtccaggtggtgcccagggaggaagaggggatgggtgtaacgctggtagctgtgggtgtggtggctgtgcttctcagtgctggaagggcggttgcagtccctggactggaggagggagtggctttggagctggtgactgtgggtgtggtggccgtggtggtcagcactttgggagggggagctgttctcagggtggaggtcggggtggccgtggatccagtggacgcagtcgtagtggctgttgtggtcggctttgtgaggatccaggtcgtccccggagttgaggagggcgtggccgtggagctggtggctggggtactggggcagtggctgtagtcgtcacagcaaagcacacgcacgttgtagttgaagcacatgttgaacctgcctgtctggtcttcgttcttgcaggtcagccccgtctccaggctgcaggtcagcacctgcccgacctggtcgatgcttacctcggggtagttctccgcccggcactctatgctctttggtgcccagcacatcttgcccccagcagccctgatgttttcaaaagtttccatgtccccgcctgcaacccctgaggttgggaagtccacgtcaaaccactctgtccactcacacttcggttgacagcgggtcgtgccctggctggtggtggtgttagtcaaggggctcattgtcgtctctgtcctgggcgtgctggtctcggcctgagaggtggacagctcgctcgtgagtgttggcgccaggctcgtggtcagcggctctttggaagcggtgctggctgtgcctgtcgggcgagctctggaggttgccattgttgttggggccagcgtgggtggctgtgaggggcgccatgtgcccaagctccccgtcgtccctggaagggctgagcgtgttggaagggtggatgtggccacccctgggacagtgggttctgtggagcctgcaggcgtcgtggggcctcccgtggtggctgtaccaagggtgcttgtgtatctgggggatgtcagtccttctgagagggtggggactgctgtggtgctggccgggggagccctggtcagccccgggctactcgtaggctgcggcgttgagaacagggcctgggtggtggtggtggtggccgtctccagctctgtggtcggtggcggggttgtggcacgtcccctgcagtggtcgtcactgcagcagaggacccggatcctgtagttgtagcacatcttgaagacgccctcctgctcccagttcctgcacaccaggccgaagtggacgtcacagtgcaccttctgccccacctgtgccagggtccagttggggaagctctcggcctggcactctatgtccttaggctgctggcataagtgccctccagcggccctgatcttatcgtaggactcaacgtcccctccaagttgttcagacttggggtagtcctcatcaaaccactctgtccactgacaccggggctggcaggtggtggtacctggggccgagggggtgaccgtcacggggcctgagctggacccagtctgcgaggtgagggccgccgtcgaccggatgctcggggtcacccatagggtggtcttttcggttgctgtggtctgggttggggtaggcacagcaggctccgtgctggcactgagggagggctgagggctggtgcctggggccggggaggggccacagggcacgtattcgcagcagagaacccgcagctcgtagtcgtgacagagcgggggactctgttggctgttggcgcacatcagcccccgcatgcggtcacagtccacctgctggcccagctcctccagcggcatgtcgggaagctgcgccgcccggcactcgatgtcagccagcacagggcatacctggtaccctctctgcctcaggttttcaaacgtctcaaagtctccgcctcccaggccgggctctgggcggtgcccattgtaccagctggaccagcggcagacctcgcggacacacacggtggagaccgggagggccgggcttgtcgtggagtgggggacccaggcggtggtgaaggtgaatggcgttgtggctggagttccaggacatgccacagccttcctgatgatggtgccgttgcttccgcagatggcgatcaagcaggcgccaagcccatcggtggtgttgtagatgacgtcctggtagctgtaggtcctgtcctcataggtgcaggtgcaggcctcaaggctgtgagcgcactggatgccactgggtgtgcagttacagctctggcagttctccgctgtggggacccttgcaccgacgtcatagtagtttccgtccttgtcgtagcagccacactgggccacgcacttcatctggtcctcattgaagaagggctggctgggtgggcacttcgggtagcagccttccaggccaggcaggtccaccaggcagtgcccactggggttccggcaggtttttaggcagggtgccccgcagggctggtagtgccactcacagcccccatgtgggttgtagaagtcacagaacaaggggcaggtgtccggagtccgccaggacacacacaggcccgcgtcgtggcaggcctgggcgtaggcagccacagccgtgcagaaacactcgcagtcgccacccgagtcgcaggcacacgcgtcgttcacgcaggcctcgtagtacttggtggagtcaacctgggagcggcaggcggcgaaggtggggccgtggaggatgctgcactgcttctgggcccaggacttgcggaaggggttggccgtgcaggggtccttgggtgccagggcgtccgggcaggagggggagagcttccagctgttcccaaactccagtgcgtcccccaccacggaccggctacgcgtggcaaagtcattgatggcattgtcgtcgaagttcccgcacaggccgcagaccctgcccttgtagtcctggtgcagtcggatgaacacgctggtcttccggtcccaggacacggccatcccgtgggtctcgatgaccaggaagatccccatgtagcgtatcttgtagggtgggtccccacccggccctctcgccaccgccttaaaggtcccctcttggaggatcagctcgtagctctccacgaagagcttgatggccttggagcaggtggtgccggtggtcccacaggggatgttctcggtgacgatgcggaaggtcccgtgggtggtgttgtccccacagtagtcctgggccaagatgtactcgcagctgccttcaaagctgtagcgatcgccatcaaaggtgatgaagtggccatccccgtaggccacgcaggtgcccaggcagagccggtggctgcactcccacctccggttcctgcaggtgcaggtgttgcagtcgaccctgatggtctctccaggcttgtaggtggcctcgttgtgcacacaggggcagtcctcctcggcaatgcagcccccactcccatccgacaccagccccgggggacagacacagccggacacgcagtgtgtgctgaaacagcccacgtccagcgtgtggcagctccggaggcactcggccccaggggtgcccgccgagctgttgctgcagtccaggtacaccatgggggctgcacaccctgtgcttttctgcagagaggctcccaggcagcttagcttcccacccgtacatgaacacacggcgccctcgtcgtgcaccacctctccaggagccagcacggtgccgtgagcgtagcaggggcactcctgggcgggcacacaggcgcccgcgtcattgaggaaggtgcccgcggggcaggtgcagccgtccacaggcacgaaggaaacgctgcaggtgacgtcggcctcactcaggccgcggcaagtgggctggcaggcatccaccacgtaggcgtagcgctgggacttggggcagttctgcatgtacttggtgcagacgccgtccctccagtcgctgagctgtacgcccttggcggcacaggcgtgcacataggaggacagcgcggcgcacaggcagtcctcgctccgctcacagttgcaggtgtcaaacatgcagttcgagtggaagggcttggggttgatgatggagtggcagcgcgagaaggcactgttgggatcggtcaggcgcgagcaccagtgccgggcgtagttctcattctccacactgagggagcaggggtcctcaaagctgttcctggcattggcacaggcagcctgggccttccaggtgttggcgaaggctgcgcccgtggcctccaccaccccgctgagggccgtgaagtcgtcagcctggttctggttgaagttcccacacaggccgcacatctggccctggtgggcggggtccagcctgacaaacacctgcatgagtggcaccagctgcaccagcagctgcagccccaggcctgtctgcaccacgatgaagaagctcgagggtgtgaacagggtgatgttggctgccgacaggggcagctgcgtgtagatggagttgaggaacacgccgccgtccgcttggacccggatggccgtgtccccgccgtccaggctgagcgtcaccgctttcaggcagttctcgttgtccgtcaggccgcacttccgcagctcagccagcacggtgaagctgctgtcggcacatttcttggacagaacgtagctgcagtcaccatgcaggtcgtagagtttctcatcataggtggagatgtgggccccgccctgcacagagcaggtgccagggcacggcaggtcctggcactgccatagccccccggagcaggtgcaggagctgcaggtggtgttgaaggaggtgcccgggctgtaggtgcggccgccgtgggtgcaggggcactgcccgaggggcaggcagccagagtgcgtgatgtcatccagcaccgtgcctggggggcagaagcagccgtccacacagtggtcctcgcagagctgcgcgcgctgggggttggagcaggtgtccgtgcagggtgagccacactcctggtgctgcatgttgagggggcaggtccgggggcagagctcagggcacctccagttccgcggctggccccccgcgtgggcgcactggcgtgagtattccacaaaggtggcacacgggcaggtggggcagcggcacaggtcctgggcgcaggcggccaggtacgcagtgctgtccaccagtgcgtggcactccgcaaaggccggccccagcagggtgcggtggcagatgccctcctcgtccgtgcagttgccggccggcaagggcagcgggtccgggcactgctccgtgggcccatccaacttctgcaggttcccaaactggagcggggtcagcctggcgttgtgggcatagaactcgttgaaggccgggaggccgttgaagtccccacacaggccacaggtctggttggcgtatttgggatccagctccagcagggcactgtcctctccgttccacaggaatgtcagcaccagccggatgctgaccttgatgtagtccccgctctgctccaccaggaggccagtgcggctgtaaggcagctcctcccgctgcccattgatgaggacggagccgttggacgcctccagcaccagcccctgggccttgatgacaacacgggtgaccacaggcctggagcccactaggcctcggcgtagctggacgttgaagtcctcgtaggcggcgcggcagtgctcagagaacacgtagttgcaaaggccagggaagcggaagacgtcgccgtcgaaggtcttgtagtggaagtcaccccaggtgctgcacacccgcccattgtgcgccgggttcagggggctcaggctggggaagacagtgacgggtggaacaaagctcacgcgccgggtgggcgaggacgtcggggcaccgccatccatggtgtgccctgcattctcccagctcggctccacagggccctgggtctctgcctgcggcaccacgagcatggccgccagagccaacaccagcgtccggcacgcgctcggggcacccatcctgggggctggcacgggtggggggacggggacgggcagggagggagccgggccgggt

SEQ ID NO: 399 - RNA, 14963 nt, Mus musculus
  source 1..14963: mol_type = mRNA
gccttgtctcagtccctcctgcctgccctctgtactgcccccaggatgggcagcagaaactggagctgggctctggtctgggcctccgtggccttgctcatggtgtggccagcagagagccagggtcaggcagagctgagctcagaacatctagaactcaccggagacagtcagagagtgtatagtgactccatatcctcatccacaaggcatgtcaccttcatcccacctatcactgtcttccctagcatgagcgccttacacctggcacacaatgggagagtgtgcagcacgtggggtgacttccattacaagacctttgatggtgacgtgttccgcttccctggcctctgtaactatgtcttctcttcacactgcggggccacctacgaggacttcaacatccaactgcgtcgtggtcttgagggttccaggcccacagtcacctatgtgctcctcagggcccaggggctggtgattgagctgtccaatggctctgtcctggtgaatggacatcgggagaagctgccctacagtcgtgcaggtctcctgatggagaagagcagtggctatgtgaaaatcagcatccgcctagtcctcaccttcctgtggaatgaagaagacagcgccctgctggagctggactccaaatacatcaaccagacgtgtgggctgtgcggtgacttcaacgggctcccagctgtcagtgagttctacacccacaacactaggctgacccctgtgcagtttggaaacttgcagaagctggatggtcctacagagcagtgccaggatgtcctaccctcagctgtcagcaactgcacagatacggaggacatctgccgtcgcaccctgcttggtcctgcctttgacaagtgcaccgctctggtagatgtcagcatgtacttggatgcctgtgtccaggacctgtgccgctgtcccacctgcccatgtgccacttttgccgaatattcccgccagtgtgcccacgcagggggctacccacagaactggaggcatcctgatctctgcaattggacatgccctttcaacatggaataccgagagtgcagttcaccctgtgtggatacctgctctaacccccagcgctctcaactctgcgaggaccactgcatggatggctgcttctgtcccccaggaactgtgctggacgatgtcagacacttgggatgcctgcccctggagcagtgccactgtacacacggtggccgaatttatgcccctggagagtccttcaacaccagctgtaggtcctgcacctgcttcggaggactgtggaagtgcaaagacctgccatgccctggcacctgctctgtgcaaggcgggtcccacatctttacctttgacgagaaactctacaatgtgcatggagactgcagctacatcctgaccaagaaatgtgcagatagtagcttcactgtgctggtcgatcttcggaagtgtggagtgacagatacggagaactgcctcaaagcagtgacactaaacctcaatagtggggacacggtcatccggatccaggtcaacggtgctgtgttcctgaactccatctttacgcagatgcccttgtcagcaggcaacattaccatcttcaagccatcatccttcttcatcatagtacagacgggcatggggctgcagcttcaagtgcagctggtgcccctcatgcaggtgtttgtccggctggaccgctcctaccaaggccagatgtgtggtctgtgtggaaacttcaaccagaaccaggctgatgacttcacagccctcagtggggtggtggagggcacaggagcagccttctccaacacctggaagactcaagcctcctgccccaactccaagaacacctatgaagacccctgctcatacagtgtggagaatgagaacttcgcccgggagtggtgctccatgctcacggaaagctcaggagttttctcagcctgccatgccactgttagcccggtgcccttctactcgaactgcttgtttgacacgtgcaactgtgagaacagtgaggactgcatgtgtgcagccctgtcctcctatgtgtttgcctgtgctgccaaaggcgtgctgctcagtggctggagggacaaagtttgctacaagtacacgaacaactgcccccaaaccaagggctacttctattcagtgagttcttgccagcctacctgccgctctctgagtgaggccgatgtcacctgcagcgtcccctttgtgacggtggatggctgcacctgccctgaaggcaccttcctgaatgacaaggaccactgtgtgccagtggaggagtgcccttgctacttccatggaactgtggtggctcccagagaggttgttacggacaacggtgtggtgtgctcgtgtacaaacgggaagttgacctgcctgggagccctgatgcagaagagcacagagtgtcaggcgcctatggtctacctggattgtaacaatgcctcagtgggtcaccacggggctgaatgcctcaaaagctgccacacactggatgtggaatgtttcagcacacagtgtgtctcgggctgcgtgtgtccctcagggctggtagcagatgggaatgggggctgtattgctgaggaagattgcccctgcatacacaatgaggtcacatatagacctggggagatcatccgggtagactgcaataactgcacctgtaagaaccgccggtgggaatgcaccaacaagccctgcatgggtgcctgtgtggcctacggggatggccactttgttacctttgatggtgaacgctacatctttgaaggtagctgcgagtataccttggctcaggactactgcagaggcaacaccagtactaatgggaccttccgaattgtcactgagaatgtcccctgtgggaccacaggaaccacctgctccaagaccatcaagatctttgtggagagctacgagctgatccttcatgaggggaactttaaggtggtagagcaagggccaagcggagaccctccatacaagatcagattcatgggcatcttcctggtcattgagatccgcagcgggatagtcgtgtcctgggacaggaagaccagtgtgtttgtccggctgcagcagcattataagggcagggtctgtggcctctgtgggaactttgacgacaatgccatcaatgacttcaccacacgcagccagtctgtggtgggcgatgtgctggagtttggaaatagctggaagttctccccatcctgcccagacgccccagttcccaaggacccctgcattgcaaacccttaccgcaagtcctgggcccagaagaagtgtagcatcatcaacagtgcaacgtttgccgcctgccactctcaggttgactctacaaaatactatgaagcctgtgtgcatgatgtgtgtgcctgtgactcagggggtgactgcgagtgtttctgcaccgctgtggccgcctatgcccaggcctgccgtgatgtgggtgtgtgcttgtcctggaggacaccggacatctgccctcttttctgtgactactacaaccctcatggggaatgtgagtggcactatcagccctgtggagccccctgtctgaagacctgtcggaacccaactggacactgcctcgttgacctgccaggtctagaaggctgctacccacagtgcccagccagccagcccttcttcaatgaggaccagatgaagtgtgtggcccagtgtggctgctacgatgacaatggaaactaccatgacattggcacacaggtccctacagctgagaattgccagagttgtctctgcacccctggtggcctccagtgtgtttacaaccttacagcctgcacatgcacctatgagggccgtacctacaactacaatgatgttgtctacaacaccacggatggccttggcgcctgcttagtagccatctgcaaagacaatgggactatagcacgcacaactgaagtgtgccatgaagtcccgtctaccacaccattcacattcaccaccaccctggcaccccttgccacaaacggctcagcttccactgtgtctaccgtgtgtgttcatgaggtctgccaatggtccatttggtatgatgagagccatccagaggctggcatgtcaggcggggactttgaaacatttgagaacctgaggaagaaggggcaccaggtgtgtcaaacccccgttggcatcgaatgccgtgcagtgaaattccctagcatggacttagagaagctgggtcagaaggtcaactgtgacccatcctctgggctgagttgcttcaacagtgaacagagccccccgctgtgccacgactatgagctgagggttctctgttgtgattatgtgccctgtggctcctctctgaccttgggcataagtaccactccctcccagcctgacaccagcagaagaccctcttcgcctacacttaccactcatacagcatcctcagaatcacagtcctggaccagagaagagaaaaagacatcagtggataaaagttacagctcaaggcaaacagtgccattcacttcaaacagcagactcacttcaacttctatgtcgtcagccagcagcctccccctgtccaaccctacctggactacaacattgaaagcgaccgacgagaacacaatgcttagctcccggacaacagcagtattcacttcacaaaccaggtccacttcaaggcccagcacagtcacacagccaatcagcagccctgagacctcctccaccacctgccaaccccaatgtcagtggacaaagtggatcgatgtagactacccttcatctagcattaatggaggagacatcgagacatatgagaatatcagggccaatggagaaaaaatctgtgagaagcctcaggacatcaggtgtatggcccagaaccacccaggagtgaatgtggacgagttgggacagaaagtgaagtgtgatgtcagctctggtctggtgtgctacaacaaggaccagggaggcactttccagatgtgctacaactacctgatcaaggtgctctgttgtagtgttagccactgccagggatctaccacccctgaaggatcggtctcaacgacagaaactgccacctccactccccagacactgtcctccaagcctctgcccaacactagttcatttgagacctggtctccctctggccctaccaccagtatggaagcctcagagatgcccaccttttggaccctgaggacaagcgtgtcgtccccacccaccactcctctcacagtcacctcagtgagcactcagcatcccaagagtctagaatcctctggcagcccatcagtggtgactgccaggtccacctctcaaggttactccctgcctcccagcagtccccacactaccaattcactctcagcaacaacctcaaaggcttccttgtccagcatgacaaccatctccacctccctgaccactcctgggccctccagtcctcctcatggaggcacgaccacacacccagtcaccactgcctccacgaccagagcagtcactgagaccctgtcctcaagacctcataccaagaccacctcagagctccctacagtttcctcagccagctccacagcaggacctggcacacagaccttctccaccacctgccaaccccaatgtcagtggacaaagtggatcgatgtagactacccttcatctagcattaatggaggagacatcgagacatatgagaatatcagggccaatggagaaaaaatctgtgagaagcctcaggacatcaggtgtatggcccagaactaccccggagtgaatgtggacaagttgggacagaaagtgaagtgtgatgtcagctctggtctggtgtgctacaacaaggaccagggaggcactttcccaatgtgctacaactacctgatcaaggtgctctgttgtagtgttagccactgccagggatctaccacccctgaaggatcggtctcaacgacagaaactaccaccgctactccccagaccctgtcctctaagcctttgcccaacactagttcaattgagacatggtctccctcaggccctaccaccagtatggaagcctcagagatgcccaccttttggaccctgaggacaagcgtgtcgtccccacccaccactcctctcacagtcacctcagtgagcactcagcatcccaagagtctagaatcctctggcagcccatcagtggtgactgccaggtccacctctccagggcactcccagcctcccagcagtccctatgctaccaattcactctcagcaacaacctcaaaggcttctctgtccagcatgacaaccatctccacctccctgaccactcctgggccctccagtcctcctcatggaggcacgaccacacacccagtcaccactgcctctacgaccagagcagtcactgagaccctgtcctcaagacctcataccaagaccacctcagagctccctacagtttcctcagtcagctccacagcaggaccaggcacacagactgggtccacttcaaggcccaacacagtcacacagccagccagcagccctgagacctcctctaccacctgccaaccccaatgtcagtggacaaagtggatcgatgtagactacccttcatctagcattaatggaggagacatcgagacatatgagaatatcagggccaatggagaaaaaatctgtgagaagcctcaggacatcaggtgtatggcccagaaccacccaggagtgaatgtggacgagttgggacagaaagtgaagtgtgatgtcagctctggtctggtgtgctacaacaaggaccagggaggcactttccagatgtgctacaactacctgatcaaggtgctctgttgtagtgttagccactgccagggatctaccacccctgaaggatcggtctcaacgacagaaactaccaccgctactccccagaccctgtcctctaagcctttgcccaacactagttcaattgagacatggtctccctcaggccctaccaccagtatggaagcctcagagatgcccaccttttggaccctgaggacaagcgtgtcgtccccacccaccactcctctcacagtcacctcagtgagcactcagcatcccaagagtctagaatcctctggcagcccatcagtggtgactgccaggtccacctctccagggcactcccagcctcccagcagtccctatgctaccaattcactctcagcaacaacctcaaaggcttctctgtccagcatgacaaccatctccacctccctgaccactcctgggccctccagtcctcctcatggaggcacgaccacacacccagtcaccactgcctctacgaccagagcagtcactgagaccctgtcctcaagacctcataccaagaccacctcagagctccctacagtttcctcagtcagctccacagcaggaccaggcacacagactgggtccacttcaaggcccaacacagtcacacagccagccagcagccctgagacctcctctaccacctgccaaccccaatgtcagtggacaaagtggatcgatgtagactacccttcatctagcattaatggaggagacatcgagacatatgagaatatcagggccaatggagaaaaaatctgtgagaagcctcaggacatcaggtgtatggcccagaaccacccaggagtgaatgtggacgagttgggacagaaagtgaagtgtgatgtcagctctggtctggtgtgctacaacaaggaccagggaggcactttccagatgtgctacaactacctgatcaaggtgctctgttgtagtgttagccactgccagcgatctaccacccctgcagggtcggcccccacaacaggaactgcccccactgccacttctgggactgctacacatacttcctggcctgcgtccagcatgcctaccagtaccacagagtcaccttcttcctctggaaaaaccacaatccttaccacagcttcttctctagccacaggcacacccagagagactcaaacctcatccttgctaaccactggtctctcctcagccctcacaaccacagggaccacctccacaggctgtaaatctcaatgcacctggacagactggctggacagtgacaaaccccaacctggccagtttgaaggagacatcgagacctactatcatattcagaacaagacaggtatcaagatatgcaagaaacccgtggacatcgagtgtgaagccgtcctctttcccaacatatccttccagaagctgggccaggaggtggtttgtaatgtggactttggactcatctgtagaaacagcaagcagagtgacaaccaaatctgtttcaactaccacatccgtgtcctctgctgtgaggaagataccagctgtatcagcacaactggactactgtctaccacctccacatcagcacctggatttcccagcacagtctccacgtctacaacaagcaagttgccatcagaggagccaataccctcaacttcattcacaactcaaagtagaccctctacccccaggacagaaaagattgtctccattgccacagctaggactactgggagtttccctgtctctagtctctctacctttccagcctctcccactagccttctcccaacttcagaagagccacattcaggtaaaccaagcacaagttcatggacagcctcctccaatgttccgagcactgccaagccaaccacctccactggcagacagttccctagaacaaaaaccacattgtggaatagtctcccttctagtaccccaaccatggccaccagatccatccatcccatttctaccacaatgacaaccaagaaccctcaaacactagtcaccagtgacatttccaaaagcaactctatgttgcctagtaggccccatatcacagcatcttcagtcacatcaacaagtggtagtcagataagcaagtcatactcctccacctccctgaccactgctgggccctccagtcctcctcatggaggcacgaccacacacccagtcaccactgcctctacgaccagagcagtcactgagaccctgtcctcaagacctcataccaagaccacctcagagctccctacagtttcctcagtcagctccacagcaggacctggcacacagactgggtccacttcaaggcccagcatagtcacacagccagtcagcagccctgagacctcctccaccacctgccaaccccaatgtcagtggacaaggtggatcaatgtagactacccttcatctagcattaatggaggagacatcgagacatatgagaatatcagggccaatggagaaaaaatctgtgagaagcctcaggacatcaggtgtatggcccagaactacccaggagtgaatgtggacgagttgggacagaaagtgaagtgtgatgtcaactctggtctggtgtgctacaacaaggaccagggaggcactttcaagatgtgctacaactacctgatcaaggtgctctgttgtagtgttagccactgccagggatctaccacccctgaaggatcggtctcaacgacagaaactgccagctccattccccagaccctgtcctccaagcctttgcccaacactagttcatttgagacctggtctccctctggccctaccaccagtatggaagcctcagagatgcccaccttttggaccctgaggacaagcgtgtcatccccacccaccactcctctcacagtcacctcagtgagcactcagcatcccaagagtctagaatcctctggcagcccatcagtggtgactgccaggtccacctctcaaggtcactccctgcctcccagcagtccccacactaccaattcactctcagcaacaacctcaaaggcttctctgtccagcatgacaaccatctccacctccctgaccacttctgagccctccagtcctcctcatggaggcacgaccacacacccagtcaccgctgcctctacgaccagagcagtcactgagaccctgtcctcaagacctcataccaagaccacctcagagctccctacagttccctcagccagctccacagcaggacctggcacacagacggggtccacttcaaggcccagcacagtcacacagccagccagcagccctgagacctcctctaccacctgccaaccccaatgtcagtggacaaagtggatcgatgtagactacccttcatctagcattaatggaggagatatagagacatatgagaatatcaggaccaatggagaaaaaatctgtgagaagcctcaggacatcaggtgtatggcccagaaccaccccggagtgaatgtggacgagttgggacagaaagtgaagtgtgatgtcaactctggtctggtgtgctacaacaaggaccagggaggcactttccagatgtgctacaactacctgatcaaggtgctctgttgtagtgttagccactgccagggatctaccaccactccagggtcggccccaatgacaggatcagcaactactgccactcagaccctgagttctatgcctcttcccaacactagtctgaccgtgaccagtcctcactcggcctccaccacagcagcaacaagcatcacggaaaccagcagcccaaggagcgtctcctcaattcatacaacacccaagatctttcctgagacattacagtcgacgactggcttgacaacacagcaaacgtcgtcaactggaatctggacaagtatgcttacgggtacagctggcactgtctcctcaacatctctgtccaccagcctagagtctactacaggcataacagaggtgtccaccagtatgcccatgacatctaccctaccagtaactgtgactaatgctactaccccccagggcacaacactctgccaacccaagtgtaagtggactgaatggtttgatgtggattcaccgacctcgggatcggtaaaaggggacatggaaacctatgagaacatcagggcctctggtaagaccttgtgccaggcaccagagaaaattgagtgtcgggcagagaactaccctgcagtgagcattgataaggttggccaagtagtaagctgcaacctagaaacggggctggtctgcaaaaatgaagaccagaaagatgatttcaaaatgtgctttaactacaatatacgtgtgctttgctgtgatgactatagccactgtcctactaccacttacaccaccatcaagtctcccctggcccctttcacaacctcagtgtcctcgagcatggagtccacctttcagactaaccgtcctgccagcccttcagggccaagcacccaagcatccacatggtctacacttcctgactcaggctgtacacctcgctgcaaatggacagagtggtttgacgcagactaccctaaccccggccccagaggcggggactttgaggtctatgcagtatttcgtgaggttggctacatcttctgcgatcagcccaaggacatcgagtgccgttcagagaaggagccagacaggcccctggaaactctagagcaggtggtccagtgtgatgtgcgatttgggctgatatgcaaaaatatcaaccaatcgggacctttgcagtattgtgacaactaccacgtgcgcctcctctgctgtgataactatagccactgtacctcgtcacccatggccaccatgtccactgctctttcttcctctcacctgccatctactcacacttccctggctttgaataccacgacttttttccccggactcagtagttccagtgagccccactcctcttccctgatgtctactcacacctccacaatgttgaccactgagacttcacctatagccactggccccactgtggccccatcctcaacctcagggaccccttacacccccaaagtttcccccagcagccaggtgaccttcagtgtgtctactgctttttcctccgtcttcagtacccccaggcctgtcttttccagccatgcatcttccccatcaccctgtttctgtcaggcatttgggcaactgttcttacctggggatatcatctacaataagactgatggagctggctgccaattctatgccatctgcaaccagtattgtgatgttgaccgcttccagggtacctgcccctcctcttcacctccaatgtcctctaccactgtacctttgcctcccctgcttcctggctgtgataatgctatccctccccggcaggtgaatgagtcttggaccctggagaactgcacagtggccaggtgccagggcaacaatcaaatcattctccttgagccggagcctgtggacaatgtcacctgtgccaaccgtcacttgcctatcaaagtgtgggaccaggagccttgccacttccactacgagtgtgaatgcttctgcagtggatgggggcactcacactacctgaccttcgatggcacctcctatactttcctggataactgtacctccgtgctcatgagagagatccaccctcgccatggtaacctgagcatccttgcccacagctactactgtggggctaccacaaatgtcacctcctgtccccgtgccctcagtgtgtactacaactccatggagattatccttaccatcagcaccactgagagcgggaaggatgagagcctgattatatgggaccaaatgtggatacgatcaggcttcagtaagaatggtgtgaccgtgtccttgagtggggccaccacaatgagtgtcaacatttccaccattggcaccatcatcacctttgatgggaacatcttccagatatggttgccctacagatatttcagcagcaatactgagggccagtgtggtacctgcacaaacagccagatagacgactgccgccggcctgatggcaccatagcttctgactgccaggacatggccaaagaatggctggtgcctgggaacagtagcagcagctgcttagctcagcctagccctctcccgagcaccactccccagaccccagtgtccagcacactgacctccaccccatgcccctctgcacctctctgtgagctgatgctgagccaggtcttcgcagagtgccacaggctcatccctccagatgccttcttcagaagctgtgtcagtgaccactgcaatgccaatattactgacatgctctgtcagagcctggaggcctatgcagcactctgccgggcccaaggtgtatgtaccaactggcgcaatgccactggaggcttgtgtgacctctcctgtccacccactaaggagtacaggccctgtggacccctgcatccagcatcctgcaactcgaggacccaggatagtacaactgggatgctggcagagggctgcttctgccctgagaaccagctcctcttcaactcacgcatggacatctgtgtgtcagagtgtccctgcgtgggaccagacgggctacccaagtttcctggagaacactggatcagcaactgtcaggcctgtgtatgtgagcccggctctgtgtcggtacagtgtgagccagtgaagtgtgagagccaggataaacccccacagtgcacagaagctggctttgtgactgtgacctggcccagtgctgacaatccatgctgccccgagacactgtgtgtttgcaattcaaccacctgccccaagagcctgcccacgtgtgagccaggatatgagctggtccagacccatgagaatagcagctgctgccccagctacagctgtcgacctaagctgtgtacatacaatgacaccatctatggggttggtacaaccttcccagggggtccctgccacacatgcacctgcctctctgatggtgaccaagagccaaaagtagagtgtaaggagacgaactgtaccacctcttgtccccagggcttcaagtacacgctggtgccagagcagtgctgcggggagtgcctgcaaaatgcctgcctcacaccagagggccacgcggtacagcccaatgaaacctgggtgaacagtcctgtggacaactgcactgcataccactgtatggctgagaatggagtctatgtgctgaccccaatccccacatcttgccctgatgtatccaactgtacgggaaccctaaggaaaacgggctgctgttactcctgtgaaaaagaggactcaagtacctgtcaagtgcacgtaaatgcgactgtcttgcggtataagggctgtgagacagaggtcaacatcaccttctgcgagggttcctgctctggaatatccaagtactccatggaggcccaggccatggaacgccagtgcacctgctgtcaggagagcaaggtccatgatgtagctgtaactatgcagtgtcctgatggtacagtcatccagcacacctatacccacatcgatgagtgcaactgtgccccggcctgcagctccctgcctgggacttccatgattgcttcctagagcccattgctagaaggcaattgcatccctaaccccttatgtccctccacctggggcagaacctgcacaactgaccatgagaaccttaggcaggcaagctccccgaggcccacaagaaccctctgtggccctcactgcctctgctccaccctccgcctgccactgttaagaccagcatcaaagagggtggtggggcaatcaagatccacttgaggagggttccaggtgaggatctggccctgaggagcctgttggctgttttggcctcattctctgtgagagcctgtggctgttaaggctccccacagcaagcctgtgtgtcctctgtcacataaaacaagccctgtgtcaggcatctcatgctcacaaaagcagatgggactgtccaagcaagatcagctaccagggatctgtatcaggcaaggtggctgcctgctggaggggctctgggatctggggttgaagaggggtctgtgctcactcatccctaagctgcaataaaccctggcactgtg

SEQ ID NO: 400 - RNA, 14963 nt, Mus musculus
  source 1..14963: mol_type = mRNA
cacagtgccagggtttattgcagcttagggatgagtgagcacagacccctcttcaaccccagatcccagagcccctccagcaggcagccaccttgcctgatacagatccctggtagctgatcttgcttggacagtcccatctgcttttgtgagcatgagatgcctgacacagggcttgttttatgtgacagaggacacacaggcttgctgtggggagccttaacagccacaggctctcacagagaatgaggccaaaacagccaacaggctcctcagggccagatcctcacctggaaccctcctcaagtggatcttgattgccccaccaccctctttgatgctggtcttaacagtggcaggcggagggtggagcagaggcagtgagggccacagagggttcttgtgggcctcggggagcttgcctgcctaaggttctcatggtcagttgtgcaggttctgccccaggtggagggacataaggggttagggatgcaattgccttctagcaatgggctctaggaagcaatcatggaagtcccaggcagggagctgcaggccggggcacagttgcactcatcgatgtgggtataggtgtgctggatgactgtaccatcaggacactgcatagttacagctacatcatggaccttgctctcctgacagcaggtgcactggcgttccatggcctgggcctccatggagtacttggatattccagagcaggaaccctcgcagaaggtgatgttgacctctgtctcacagcccttataccgcaagacagtcgcatttacgtgcacttgacaggtacttgagtcctctttttcacaggagtaacagcagcccgttttccttagggttcccgtacagttggatacatcagggcaagatgtggggattggggtcagcacatagactccattctcagccatacagtggtatgcagtgcagttgtccacaggactgttcacccaggtttcattgggctgtaccgcgtggccctctggtgtgaggcaggcattttgcaggcactccccgcagcactgctctggcaccagcgtgtacttgaagccctggggacaagaggtggtacagttcgtctccttacactctacttttggctcttggtcaccatcagagaggcaggtgcatgtgtggcagggaccccctgggaaggttgtaccaaccccatagatggtgtcattgtatgtacacagcttaggtcgacagctgtagctggggcagcagctgctattctcatgggtctggaccagctcatatcctggctcacacgtgggcaggctcttggggcaggtggttgaattgcaaacacacagtgtctcggggcagcatggattgtcagcactgggccaggtcacagtcacaaagccagcttctgtgcactgtgggggtttatcctggctctcacacttcactggctcacactgtaccgacacagagccgggctcacatacacaggcctgacagttgctgatccagtgttctccaggaaacttgggtagcccgtctggtcccacgcagggacactctgacacacagatgtccatgcgtgagttgaagaggagctggttctcagggcagaagcagccctctgccagcatcccagttgtactatcctgggtcctcgagttgcaggatgctggatgcaggggtccacagggcctgtactccttagtgggtggacaggagaggtcacacaagcctccagtggcattgcgccagttggtacatacaccttgggcccggcagagtgctgcataggcctccaggctctgacagagcatgtcagtaatattggcattgcagtggtcactgacacagcttctgaagaaggcatctggagggatgagcctgtggcactctgcgaagacctggctcagcatcagctcacagagaggtgcagaggggcatggggtggaggtcagtgtgctggacactggggtctggggagtggtgctcgggagagggctaggctgagctaagcagctgctgctactgttcccaggcaccagccattctttggccatgtcctggcagtcagaagctatggtgccatcaggccggcggcagtcgtctatctggctgtttgtgcaggtaccacactggccctcagtattgctgctgaaatatctgtagggcaaccatatctggaagatgttcccatcaaaggtgatgatggtgccaatggtggaaatgttgacactcattgtggtggccccactcaaggacacggtcacaccattcttactgaagcctgatcgtatccacatttggtcccatataatcaggctctcatccttcccgctctcagtggtgctgatggtaaggataatctccatggagttgtagtacacactgagggcacggggacaggaggtgacatttgtggtagccccacagtagtagctgtgggcaaggatgctcaggttaccatggcgagggtggatctctctcatgagcacggaggtacagttatccaggaaagtataggaggtgccatcgaaggtcaggtagtgtgagtgcccccatccactgcagaagcattcacactcgtagtggaagtggcaaggctcctggtcccacactttgataggcaagtgacggttggcacaggtgacattgtccacaggctccggctcaaggagaatgatttgattgttgccctggcacctggccactgtgcagttctccagggtccaagactcattcacctgccggggagggatagcattatcacagccaggaagcaggggaggcaaaggtacagtggtagaggacattggaggtgaagaggaggggcaggtaccctggaagcggtcaacatcacaatactggttgcagatggcatagaattggcagccagctccatcagtcttattgtagatgatatccccaggtaagaacagttgcccaaatgcctgacagaaacagggtgatggggaagatgcatggctggaaaagacaggcctgggggtactgaagacggaggaaaaagcagtagacacactgaaggtcacctggctgctgggggaaactttgggggtgtaaggggtccctgaggttgaggatggggccacagtggggccagtggctataggtgaagtctcagtggtcaacattgtggaggtgtgagtagacatcagggaagaggagtggggctcactggaactactgagtccggggaaaaaagtcgtggtattcaaagccagggaagtgtgagtagatggcaggtgagaggaagaaagagcagtggacatggtggccatgggtgacgaggtacagtggctatagttatcacagcagaggaggcgcacgtggtagttgtcacaatactgcaaaggtcccgattggttgatatttttgcatatcagcccaaatcgcacatcacactggaccacctgctctagagtttccaggggcctgtctggctccttctctgaacggcactcgatgtccttgggctgatcgcagaagatgtagccaacctcacgaaatactgcatagacctcaaagtccccgcctctggggccggggttagggtagtctgcgtcaaaccactctgtccatttgcagcgaggtgtacagcctgagtcaggaagtgtagaccatgtggatgcttgggtgcttggccctgaagggctggcaggacggttagtctgaaaggtggactccatgctcgaggacactgaggttgtgaaaggggccaggggagacttgatggtggtgtaagtggtagtaggacagtggctatagtcatcacagcaaagcacacgtatattgtagttaaagcacattttgaaatcatctttctggtcttcatttttgcagaccagccccgtttctaggttgcagcttactacttggccaaccttatcaatgctcactgcagggtagttctctgcccgacactcaattttctctggtgcctggcacaaggtcttaccagaggccctgatgttctcataggtttccatgtccccttttaccgatcccgaggtcggtgaatccacatcaaaccattcagtccacttacacttgggttggcagagtgttgtgccctggggggtagtagcattagtcacagttactggtagggtagatgtcatgggcatactggtggacacctctgttatgcctgtagtagactctaggctggtggacagagatgttgaggagacagtgccagctgtacccgtaagcatacttgtccagattccagttgacgacgtttgctgtgttgtcaagccagtcgtcgactgtaatgtctcaggaaagatcttgggtgttgtatgaattgaggagacgctccttgggctgctggtttccgtgatgcttgttgctgctgtggtggaggccgagtgaggactggtcacggtcagactagtgttgggaagaggcatagaactcagggtctgagtggcagtagttgctgatcctgtcattggggccgaccctggagtggtggtagatccctggcagtggctaacactacaacagagcaccttgatcaggtagttgtagcacatctggaaagtgcctccctggtccttgttgtagcacaccagaccagagttgacatcacacttcactttctgtcccaactcgtccacattcactccggggtggttctgggccatacacctgatgtcctgaggcttctcacagattttttctccattggtcctgatattctcatatgtctctatatctcctccattaatgctagatgaagggtagtctacatcgatccactttgtccactgacattggggttggcaggtggtagaggaggtctcagggctgctggctggctgtgtgactgtgctgggccttgaagtggaccccgtctgtgtgccaggtcctgctgtggagctggctgagggaactgtagggagctctgaggtggtcttggtatgaggtcttgaggacagggtctcagtgactgctctggtcgtagaggcagcggtgactgggtgtgtggtcgtgcctccatgaggaggactggagggctcagaagtggtcagggaggtggagatggttgtcatgctggacagagaagcctttgaggttgttgctgagagtgaattggtagtgtggggactgctgggaggcagggagtgaccttgagaggtggacctggcagtcaccactgatgggctgccagaggattctagactcttgggatgctgagtgctcactgaggtgactgtgagaggagtggtgggtggggatgacacgcttgtcctcagggtccaaaaggtgggcatctctgaggcttccatactggtggtagggccagagggagaccaggtctcaaatgaactagtgttgggcaaaggcttggaggacagggtctggggaatggagctggcagtttctgtcgttgagaccgatccttcaggggtggtagatccctggcagtggctaacactacaacagagcaccttgatcaggtagttgtagcacatcttgaaagtgcctccctggtccttgttgtagcacaccagaccagagttgacatcacacttcactttctgtcccaactcgtccacattcactcctgggtagttctgggccatacacctgatgtcctgaggcttctcacagattttttctccattggccctgatattctcatatgtctcgatgtctcctccattaatgctagatgaagggtagtctacattgatccaccttgtccactgacattggggttggcaggtggtggaggaggtctcagggctgctgactggctgtgtgactatgctgggccttgaagtggacccagtctgtgtgccaggtcctgctgtggagctgactgaggaaactgtagggagctctgaggtggtcttggtatgaggtcttgaggacagggtctcagtgactgctctggtcgtagaggcagtggtgactgggtgtgtggtcgtgcctccatgaggaggactggagggcccagcagtggtcagggaggtggaggagtatgacttgcttatctgactaccacttgttgatgtgactgaagatgctgtgatatggggcctactaggcaacatagagttgcttttggaaatgtcactggtgactagtgtttgagggttcttggttgtcattgtggtagaaatgggatggatggatctggtggccatggttggggtactagaagggagactattccacaatgtggtttttgttctagggaactgtctgccagtggaggtggttggcttggcagtgctcggaacattggaggaggctgtccatgaacttgtgcttggtttacctgaatgtggctcttctgaagttgggagaaggctagtgggagaggctggaaaggtagagagactagagacagggaaactcccagtagtcctagctgtggcaatggagacaatcttttctgtcctgggggtagagggtctactttgagttgtgaatgaagttgagggtattggctcctctgatggcaacttgcttgttgtagacgtggagactgtgctgggaaatccaggtgctgatgtggaggtggtagacagtagtccagttgtgctgatacagctggtatcttcctcacagcagaggacacggatgtggtagttgaaacagatttggttgtcactctgcttgctgtttctacagatgagtccaaagtccacattacaaaccacctcctggcccagcttctggaaggatatgttgggaaagaggacggcttcacactcgatgtccacgggtttcttgcatatcttgatacctgtcttgttctgaatatgatagtaggtctcgatgtctccttcaaactggccaggttggggtttgtcactgtccagccagtctgtccaggtgcattgagatttacagcctgtggaggtggtccctgtggttgtgagggctgaggagagaccagtggttagcaaggatgaggtttgagtctctctgggtgtgcctgtggctagagaagaagctgtggtaaggattgtggtttttccagaggaagaaggtgactctgtggtactggtaggcatgctggacgcaggccaggaagtatgtgtagcagtcccagaagtggcagtgggggcagttcctgttgtgggggccgaccctgcaggggtggtagatcgctggcagtggctaacactacaacagagcaccttgatcaggtagttgtagcacatctggaaagtgcctccctggtccttgttgtagcacaccagaccagagctgacatcacacttcactttctgtcccaactcgtccacattcactcctgggtggttctgggccatacacctgatgtcctgaggcttctcacagattttttctccattggccctgatattctcatatgtctcgatgtctcctccattaatgctagatgaagggtagtctacatcgatccactttgtccactgacattggggttggcaggtggtagaggaggtctcagggctgctggctggctgtgtgactgtgttgggccttgaagtggacccagtctgtgtgcctggtcctgctgtggagctgactgaggaaactgtagggagctctgaggtggtcttggtatgaggtcttgaggacagggtctcagtgactgctctggtcgtagaggcagtggtgactgggtgtgtggtcgtgcctccatgaggaggactggagggcccaggagtggtcagggaggtggagatggttgtcatgctggacagagaagcctttgaggttgttgctgagagtgaattggtagcatagggactgctgggaggctgggagtgccctggagaggtggacctggcagtcaccactgatgggctgccagaggattctagactcttgggatgctgagtgctcactgaggtgactgtgagaggagtggtgggtggggacgacacgcttgtcctcagggtccaaaaggtgggcatctctgaggcttccatactggtggtagggcctgagggagaccatgtctcaattgaactagtgttgggcaaaggcttagaggacagggtctggggagtagcggtggtagtttctgtcgttgagaccgatccttcaggggtggtagatccctggcagtggctaacactacaacagagcaccttgatcaggtagttgtagcacatctggaaagtgcctccctggtccttgttgtagcacaccagaccagagctgacatcacacttcactttctgtcccaactcgtccacattcactcctgggtggttctgggccatacacctgatgtcctgaggcttctcacagattttttctccattggccctgatattctcatatgtctcgatgtctcctccattaatgctagatgaagggtagtctacatcgatccactttgtccactgacattggggttggcaggtggtagaggaggtctcagggctgctggctggctgtgtgactgtgttgggccttgaagtggacccagtctgtgtgcctggtcctgctgtggagctgactgaggaaactgtagggagctctgaggtggtcttggtatgaggtcttgaggacagggtctcagtgactgctctggtcgtagaggcagtggtgactgggtgtgtggtcgtgcctccatgaggaggactggagggcccaggagtggtcagggaggtggagatggttgtcatgctggacagagaagcctttgaggttgttgctgagagtgaattggtagcatagggactgctgggaggctgggagtgccctggagaggtggacctggcagtcaccactgatgggctgccagaggattctagactcttgggatgctgagtgctcactgaggtgactgtgagaggagtggtgggtggggacgacacgcttgtcctcagggtccaaaaggtgggcatctctgaggcttccatactggtggtagggcctgagggagaccatgtctcaattgaactagtgttgggcaaaggcttagaggacagggtctggggagtagcggtggtagtttctgtcgttgagaccgatccttcaggggtggtagatccctggcagtggctaacactacaacagagcaccttgatcaggtagttgtagcacattgggaaagtgcctccctggtccttgttgtagcacaccagaccagagctgacatcacacttcactttctgtcccaacttgtccacattcactccggggtagttctgggccatacacctgatgtcctgaggcttctcacagattttttctccattggccctgatattctcatatgtctcgatgtctcctccattaatgctagatgaagggtagtctacatcgatccactttgtccactgacattggggttggcaggtggtggagaaggtctgtgtgccaggtcctgctgtggagctggctgaggaaactgtagggagctctgaggtggtcttggtatgaggtcttgaggacagggtctcagtgactgctctggtcgtggaggcagtggtgactgggtgtgtggtcgtgcctccatgaggaggactggagggcccaggagtggtcagggaggtggagatggttgtcatgctggacaaggaagcctttgaggttgttgctgagagtgaattggtagtgtggggactgctgggaggcagggagtaaccttgagaggtggacctggcagtcaccactgatgggctgccagaggattctagactcttgggatgctgagtgctcactgaggtgactgtgagaggagtggtgggtggggacgacacgcttgtcctcagggtccaaaaggtgggcatctctgaggcttccatactggtggtagggccagagggagaccaggtctcaaatgaactagtgttgggcagaggcttggaggacagtgtctggggagtggaggtggcagtttctgtcgttgagaccgatccttcaggggtggtagatccctggcagtggctaacactacaacagagcaccttgatcaggtagttgtagcacatctggaaagtgcctccctggtccttgttgtagcacaccagaccagagctgacatcacacttcactttctgtcccaactcgtccacattcactcctgggtggttctgggccatacacctgatgtcctgaggcttctcacagattttttctccattggccctgatattctcatatgtctcgatgtctcctccattaatgctagatgaagggtagtctacatcgatccactttgtccactgacattggggttggcaggtggtggaggaggtctcagggctgctgattggctgtgtgactgtgctgggccttgaagtggacctggtttgtgaagtgaatactgctgttgtccgggagctaagcattgtgttctcgtcggtcgctttcaatgttgtagtccaggtagggttggacagggggaggctgctggctgacgacatagaagttgaagtgagtctgctgtttgaagtgaatggcactgtttgccttgagctgtaacttttatccactgatgtctttttctcttctctggtccaggactgtgattctgaggatgctgtatgagtggtaagtgtaggcgaagagggtcttctgctggtgtcaggctgggagggagtggtacttatgcccaaggtcagagaggagccacagggcacataatcacaacagagaaccctcagctcatagtcgtggcacagcggggggctctgttcactgttgaagcaactcagcccagaggatgggtcacagttgaccttctgacccagcttctctaagtccatgctagggaatttcactgcacggcattcgatgccaacgggggtttgacacacctggtgccccttcttcctcaggttctcaaatgtttcaaagtccccgcctgacatgccagcctctggatggctctcatcataccaaatggaccattggcagacctcatgaacacacacggtagacacagtggaagctgagccgtttgtggcaaggggtgccagggtggtggtgaatgtgaatggtgtggtagacgggacttcatggcacacttcagttgtgcgtgctatagtcccattgtctttgcagatggctactaagcaggcgccaaggccatccgtggtgttgtagacaacatcattgtagttgtaggtacggccctcataggtgcatgtgcaggctgtaaggttgtaaacacactggaggccaccaggggtgcagagacaactctggcaattctcagctgtagggacctgtgtgccaatgtcatggtagtttccattgtcatcgtagcagccacactgggccacacacttcatctggtcctcattgaagaagggctggctggctgggcactgtgggtagcagccttctagacctggcaggtcaacgaggcagtgtccagttgggttccgacaggtcttcagacagggggctccacagggctgatagtgccactcacattccccatgagggttgtagtagtcacagaaaagagggcagatgtccggtgtcctccaggacaagcacacacccacatcacggcaggcctgggcataggcggccacagcggtgcagaaacactcgcagtcaccccctgagtcacaggcacacacatcatgcacacaggcttcatagtattttgtagagtcaacctgagagtggcaggcggcaaacgttgcactgttgatgatgctacacttcttctgggcccaggacttgcggtaagggtttgcaatgcaggggtccttgggaactggggcgtctgggcaggatggggagaacttccagctatttccaaactccagcacatcgcccaccacagactggctgcgtgtggtgaagtcattgatggcattgtcgtcaaagttcccacagaggccacagaccctgcccttataatgctgctgcagccggacaaacacactggtcttcctgtcccaggacacgactatcccgctgcggatctcaatgaccaggaagatgcccatgaatctgatcttgtatggagggtctccgcttggcccttgctctaccaccttaaagttcccctcatgaaggatcagctcgtagctctccacaaagatcttgatggtcttggagcaggtggttcctgtggtcccacaggggacattctcagtgacaattcggaaggtcccattagtactggtgttgcctctgcagtagtcctgagccaaggtatactcgcagctaccttcaaagatgtagcgttcaccatcaaaggtaacaaagtggccatccccgtaggccacacaggcacccatgcagggcttgttggtgcattcccaccggcggttcttacaggtgcagttattgcagtctacccggatgatctccccaggtctatatgtgacctcattgtgtatgcaggggcaatcttcctcagcaatacagcccccattcccatctgctaccagccctgagggacacacgcagcccgagacacactgtgtgctgaaacattccacatccagtgtgtggcagcttttgaggcattcagccccgtggtgacccactgaggcattgttacaatccaggtagaccataggcgcctgacactctgtgctcttctgcatcagggctcccaggcaggtcaacttcccgtttgtacacgagcacaccacaccgttgtccgtaacaacctctctgggagccaccacagttccatggaagtagcaagggcactcctccactggcacacagtggtccttgtcattcaggaaggtgccttcagggcaggtgcagccatccaccgtcacaaaggggacgctgcaggtgacatcggcctcactcagagagcggcaggtaggctggcaagaactcactgaatagaagtagcccttggtttgggggcagttgttcgtgtacttgtagcaaactttgtccctccagccactgagcagcacgcctttggcagcacaggcaaacacataggaggacagggctgcacacatgcagtcctcactgttctcacagttgcacgtgtcaaacaagcagttcgagtagaagggcaccgggctaacagtggcatggcaggctgagaaaactcctgagctttccgtgagcatggagcaccactcccgggcgaagttctcattctccacactgtatgagcaggggtcttcataggtgttcttggagttggggcaggaggcttgagtcttccaggtgttggagaaggctgctcctgtgccctccaccaccccactgagggctgtgaagtcatcagcctggttctggttgaagtttccacacagaccacacatctggccttggtaggagcggtccagccggacaaacacctgcatgaggggcaccagctgcacttgaagctgcagccccatgcccgtctgtactatgatgaagaaggatgatggcttgaagatggtaatgttgcctgctgacaagggcatctgcgtaaagatggagttcaggaacacagcaccgttgacctggatccggatgaccgtgtccccactattgaggtttagtgtcactgctttgaggcagttctccgtatctgtcactccacacttccgaagatcgaccagcacagtgaagctactatctgcacatttcttggtcaggatgtagctgcagtctccatgcacattgtagagtttctcgtcaaaggtaaagatgtgggacccgccttgcacagagcaggtgccagggcatggcaggtctttgcacttccacagtcctccgaagcaggtgcaggacctacagctggtgttgaaggactctccaggggcataaattcggccaccgtgtgtacagtggcactgctccaggggcaggcatcccaagtgtctgacatcgtccagcacagttcctgggggacagaagcagccatccatgcagtggtcctcgcagagttgagagcgctgggggttagagcaggtatccacacagggtgaactgcactctcggtattccatgttgaaagggcatgtccaattgcagagatcaggatgcctccagttctgtgggtagccccctgcgtgggcacactggcgggaatattcggcaaaagtggcacatgggcaggtgggacagcggcacaggtcctggacacaggcatccaagtacatgctgacatctaccagagcggtgcacttgtcaaaggcaggaccaagcagggtgcgacggcagatgtcctccgtatctgtgcagttgctgacagctgagggtaggacatcctggcactgctctgtaggaccatccagcttctgcaagtttccaaactgcacaggggtcagcctagtgttgtgggtgtagaactcactgacagctgggagcccgttgaagtcaccgcacagcccacacgtctggttgatgtatttggagtccagctccagcagggcgctgtcttcttcattccacaggaaggtgaggactaggcggatgctgattttcacatagccactgctcttctccatcaggagacctgcacgactgtagggcagcttctcccgatgtccattcaccaggacagagccattggacagctcaatcaccagcccctgggccctgaggagcacataggtgactgtgggcctggaaccctcaagaccacgacgcagttggatgttgaagtcctcgtaggtggccccgcagtgtgaagagaagacatagttacagaggccagggaagcggaacacgtcaccatcaaaggtcttgtaatggaagtcaccccacgtgctgcacactctcccattgtgtgccaggtgtaaggcgctcatgctagggaagacagtgataggtgggatgaaggtgacatgccttgtggatgaggatatggagtcactatacactctctgactgtctccggtgagttctagatgttctgagctcagctctgcctgaccctggctctctgctggccacaccatgagcaaggccacggaggcccagaccagagcccagctccagtttctgctgcccatcctgggggcagtacagagggcaggcaggagggactgagacaaggc

SEQ ID NO: 401 - RNA, 12342 nt, Rattus norvegicus
  source 1..12342: mol_type = mRNA
gtgccttgtcttagtccctcctgcctgccctctgtactgcccccaggatgggcggcaggaattggagctgggctctggtctgggcttctgtggccttgctcatggtgtggccagcagagagccagggccaggaagagctgagcgcagaacatccagaactcaccggagacagtcagaaagtgtatagtgcccccacatcctcatccgcacggcatgtcaccttcatcccacctatctctgtcttcccaagcataagtgccttacacctggcacacaacgggagagtgtgcagcacgtggggtgacttccattataagaccttcgatggtgacgtgttccgcttccctggcctctgtaactatgtcttctcttcacactgcggggccacctacgaggacttcaacatccaattacgtcgtggtcttgagggttccaggcccacggtcacctatgtgttcctcagggcccagggactggtgattgagctgtctaatggctctgtcctggtaaacggacatcgggaggagctgccctacagccgtgcaggtcttctgatggagaagaccagtggctatgtgaagatcagcatcaggctagtcctcaacttcctgtggaatgaagaagacagtgtcctgctggaactggactccaaatacaccaaccagacgtgtgggctgtgcggtgacttcaacgggctcccagctgtcaatgagttctacgcccacaacactaggctgacccctgtccagtttggaaacctgcagaagctggatggtcccacagaacagtgccaggatgtcctactgtcacctgccaacaactgcacagatacggagggcatctgccgtcacatcctgcttggccctgcctttgccgagtgcatcgccctggtagacgtcaacgtgtacctggatgcctgtgtccaggacctgtgccgctgccccacctgcccatgtgccacttttgctgaatattcccgccagtgtgcccatgcagggggccacccacagaactggaggcgttccgatctctgcaactggacctgccctttcaacatggaataccaagagtgcagctcaccctgtgtggatacctgctccaacccccagcgctctcaactgtgcgaggaccactgcatggatggctgcttctgtcccccaggaactgtgctggatgatgtcagacatttgggctgcctgcccctggaacagtgccactgtacccacggtggccacatttatgcccctggagagtccttcaacaccacctgtagctcctgcacctgcttcgggggactgtggcagtgccaggacctgccgtgccccggcacctgctctgtgcaaggcgggtcccacatctccacctttgatgagaaactctacaatgtgcatggagactgcagctacatcctgaccaagaaatgtgcagatagcagcttcactgtgctggtggatcttcggaagtgtggaatgacggacaccgagaactgcctcaaagcagtgacgctgagcctcaatagcggggacatggtcgtcaggatccaggtcaacggtgctgtgttcctgaactccattttcactcaactgcccttgtcagcaggcaacgtcaccatcttcaggccatcatccttcttcgttatagtacaggtgggcacggggctgcagctgcaagtgcagctggtgcccttcatgcaggtgtttgtcaggctggaccgctcctaccaaggccagatgtgtggcctgtgtggaaacttcaaccagaaccaggccgatgacttcacggccctcagtggggtggtggagggcacaggggcagccttctccaacacctggaagactcaagcctcctgccccaactccaagaacacctatgaagacccctgctcatacagtgtggagaacgagaacttcgctcgggagtggtgctcgatgctcactgaaagctcaggagttttctcagcctgccatgccactgttagcccggtgcccttctactcgaactgcttgtttgacacgtgcaactgtgagaatagcgaggactgcatgtgtgccgccctgtcctcctacgtgcgtgcctgtgctgccaaaggcgtgctgctcagtggctggaggggcaaagcctgctacaagtacatgaacaactgcccccaaaccaaggagtactcctactcagtgagtacttgccagcctacgtgccgctctctaagtgaggttgacgtcacctgcagcatcccctttgtgcctgtggatggttgcacctgccctgaaggtaccttcctgaatgacaaggaccactgtgtcccagtggaggagtgcccctgctacttccatggaaccgtggtggcttccggagaggttgttatggacaacggtgtggtgtgctcgtgtacaaatgggaagttgacctgcctgggagccctgatgcagagaaacaaagagtgccaggcacctatggtatacttggactgtaacaatgcctcagtgggtgaccacggggctgaatgcctcagaagctgccacacgctggatgtggattgcttcagcacacaatgtgtctcgggctgcgtgtgtccctcagggctggtagcagatgggaatgggggctgcattgctgaggaggactgcccctgcgtacacaatgaggccacatacagacctggggagatcattcgggtagactgcaataactgcacctgccggaaccgccggtgggaatgcaccaaccagccctgcatgggtgcctgtgtagcctatggggacggccactttgttacctttgatggtgaacgttacatctttgaaggcaactgcgagtataccttggctcaagactactgcagaggcaacaccagtactgatgggaccttccgtattgtcactgagaatgtcccctgtgggaccacaggaaccacctgctccaaggccatcaagatctttgtggagagctatgagctgatccttcatgaggggaactttaaggtggtagcgcgagggccaagtggggaccctccgtacaagatcagatacatgggcatcttcctggtcattgagatccggagtgggatagtcgtgtcctgggacaggaagaccagtgtgtttgtccggctgcagcagcattataagggtagggtctgcggcctgtgtgggaactttgatgacaatgccatcaatgacttcaccacacgcagccagtctgtggtgggtgatgtgctggagtttggaaatagctggaagttctccccatcctgcccggatgccccagttcccaaggatccctgcatcgccaacccttaccgcaagtcctgggcccagaaaaaatgtagcatcatcaacagcgcaactttcgctgcctgccactctcaggttgactctacaaaatactacgaagcctgtgtgcatgatgtgtgtgcctgtgactcaggaggtgactgtgagtgcttctgcactgccgtggccgcctacgcccaggcctgccgtgatgtgggtgtgtgcttgtcctggaggactccagacatctgccctcttttctgtgactactacaaccctcatgggcaatgtgagtggcattatcagccctgtggagccccctgtctgaagacctgtcggaatccatctggacactgcctggttgacctgccaggcctagaaggctgctacccacagtgtccacccagccagcccttcttcaatgaagaccagatgaagtgtgtggcccagtgtggctgctatgatgatgacggaaactatcatgacattggcacacaggtccctacagctgagaactgccagagttgtctctgcacccctggtggcctccagtgtgcttacaaccttacagcctgcacatgcatctatgagggccgtacctacaactacaatgatgttgtctacaacaccactgatggcctcggtgcctgcttagtagccatctgcaaagacaacgggactataaaacgcacgactgaagagtgccctgaagtcccgtctaccacaccattcatattcaccaccactctgacaccccttaccacaaacggttcagcttccactgcgtctactgtgtgtgttcgtgaggtctgccactggtccagttggtatgatgagagccatccagaggctggcatgttaggcggggactttgaaacatttgagaacctgaggaggaaagggtaccaggtgtgtcaaacccccgttgccattgaatgccgagcagtgaagttccccagcctggacttagagaagctgggtcagaaggtaaactgtgacctatcctctgggttgagatgcttcaacaatgaacagagccccccactgtgccacaactatgagctgagggttctgtgttgtgattatgtgccctgtggctcctctctgacctcgggtgtgagtaccactccctctcagtctgacaccagtaaaaacccctctctgcccacacttaccactcatacagcatcctcaaaatcacagtcctggaccagaggtgggaaagagacatcactggataaaactcacagctcaaggcaaacagtgacgtttgcctcaaagagcagacctacttcatctcctacgtcatctagaaactcagccagcagcctccccttgtccaaccctacctggactacaacagtgaaagggaccaatgagaacacagtgcttagctcccagacaacagcagaattcacttcacacaccaggtccacttcaagccccaacacagtcacacagacagtcagcagccctgagacctcctccaccacctgccaacccaaatgtgagtggacaaagtggattgatgtagactatcctacttctagcattgatggaggagacatagagacatatgacaatatcagggccaatggagaaaaagtctgtgagaagcctaaggacatcaggtgtatggcccagaactaccccgaagaggccttagacaacttgcaacagaaagtgaagtgtgatgtcagccttggtctggtgtgctacaaccgggaccagggaggcattttcccgatgtgctacaactacatgatcaaggtgctctgttgtagtgtcatccactgccagggatcttccaccactgcagagtcggccctgacgacgggaactgccactttcactacccagaccctgtcctccaagcctcatcccaacactgattcagttgagacctggtctccctcagggtccaccacccatatagatgcttcagatttgcccacccctggaaccctgactacaagtgtgtcatccccactcaccacccctctcacagtcacttcagtgagcactcagcatcccaagagtctagaatcctctggcatcccatctgtggtgactatcaggtccacctctcaagggcagtccctgcttcccagcagtccccacactaccaacacgttctcagcaacaacctcaaggacttccctgtctagcctggccaccatctctacctccctgaccactcctggaccctccagaactcctcctgggagcactaccacaaacccagccacagctgcctccatgaccagagcggttactgagaccctgtcctcaaggccacataccgagaccacctcagagttccctggagtttcctcagccagctccacagtagggcccagcacacagactgggtccacttcaagccccagcacggtcatacagacagtcagcagccctgagacctcctccaccacctgccaacccaaatgtgagtggacaaagtggattgatgtagactatcctacctctagcattgatggaggagacatagagacatatgacaatatcagggccaatggagaaaaagtctgtgagaagcctaaggacatcaggtgtatggcccagaactaccctggacaggccttagacaacttgcaacagaaagtgaagtgtgatgtcagccttggtctggtgtgctacaaccgggaccagggaggcattttcccgatgtgctacaactacatgatcaaggtgctctgttgtagtgtcatccactgccagggatcttccaccactacagaatcagccccgacgatgggaactgccactactgccacttctgggacatccacacacacttcctggcctgtgtccagcatgcctaccagcgccagcactacagagtcattttcttcccgtgaaaaaaccacagtccttaccagagcttcctctacagctacagtgacatccagggagactcaaacctcatccttgctaaccactggtccatcctcagccctcacaaccacagagaccacttccacaggctgtaaatctcagtgcacctggacagattggctggacagtgacaaaccccaacctggccagtttggaggagacattgagacctactatcatattcaaaacaagacaggtatcgagatatgcaagaaacctgtggacattgagtgtgaggccatcctcttccccaacatgtccttccagcaactgggccaggaggtggtttgtaatgtggacttcggactcatctgtaggaatagcaagcaggtcgacaatgaaacttgtttcaactaccatatccgtgtcctctgctgtgaggaagatatcagctgtatcagcacaactgggtcactgtccaccacttccacaccagcaactggatttcccagcatagtccccatgtccacaagcaagtggtcatcagaggagccaaaatcctcaacttctttcacaactcaaaggagaccctctacccctaggacagagaagattgtccccaacaccacgactaggactactgggagtttctctgcctctagtctctctacacttccagcctctcccaccagccgtctccaaacctcaaaagagccacactcgggtaagccaagtacaagtttgtggacagcctcctccaatgttctgagcactgccacgctgaccacctctattggcaaaccggtctctggaacaaaaaccacattgtggaaagacctccattctagtacctcaaccatggccacatccacccatcccatttctaccacaatgacaacgaagaaccctcaaacactgaccaccaatgacatttccaaaagcaactctatgctgcctagtaggccccatatcaccacaacatcttcagccccagcaacaaataggagtctggccaccatctctacctccctgaccactcctggaccctccagaactcctcctgggagcactaccacaaacccagccacagctgcctccatgaccagagcggttactgagaccccgtcctcaaggccacataccgagaccacctcagagctccctggagtttcctcagccagctccacagtagggcccagcacacagactgggtccacttcaagccccagcacggtcatacagacagtcagcagccctgagacctcctccaccacctgccaacccaaatgtgagtggacaaagtggattgatgtagactatcctacctctagcattgatggaggagacatagagacatatgacaatatcagggccaatggagaaaaagtctgtgagaagcctaaggacatcaggtgtatggcccagaactaccctggacaggccttagacaacttgcaacagaaagtgaagtgtgatgtcagccttggtctggtgtgctacaaccgggaccagggaggcattttcccgatgtgctacaactacatgatcaaggtgctctgttgtagtgtcatccactgccagggatcttccaccactacagagtcggccctgacgacgggaactgccaccacggcagggtcagtcccagtgacgggatcagcaactactgccactcagaccctgagtcctaagcctcttcccaacactagtctgactgtggccagtacccacccagcctccaccacagtaggaacaagcgtctcaaaagctctaacaggctctagccacacagccactcttgttacatcccatggcacaaggcccccacatgtttcaactatcaaggaaaccagcagcccgggaagagcctcctcaatccatacaacacccaagaccttgcctgagacattacagtcgacatctggcttgacaacacaacagatctcgtcaactggaatctggacaagtgtacatacgggtacagctggcactgtctccccaaaatctctgtccaccaccctagaaacgactacaggcataaaagagccatccaccagtgtaccaatgacacataccctaccaccaaccgtgactaatgcaaccacctcccagggcacaacacactgccagcccaagtgtaagtggactgaatggtttgatgtggactcaccgacatcgggggtagtaaaaggggacatggagacctatgaaaacatcagggcctctggcaagaagatgtgccaggcaccagagaaaattgagtgtcgggcagagaactaccctgcagtgagtattgataaggttggtcaagtagtaagctgcaacctggagacggggctagtctgcagaaatgaggagcagacagatgattttaaaatgtgcttcaactacaatatacgtgtgctttgctgtgatgactatagccactgtcctgaaaccccttacagcaccatcaagccatccccgctctggtctacccctacgcccctggtccctttcacaacctcagtgtcctcgagcacggagtccacctttcagactaagcatccctccagctcttccgtatcaagcacccaagcctccacatggactatatctcctgactcgggctgtgaacctcgctgcaaatggacagagtggtttgacgccgacttccccaaccctggccccagaggcggggactttgaggtctacgcagtgcttcgtgaggttggctttatcttctgtgatcaacccaaggacatccaatgccgttcagagaaggagccagacaagcccctggaagctctacagcaggtggtcctgtgtgatgtgcgattcgggctgatatgcaaaaatatcaaccaatcgggacctttgcagtattgtgacaactaccacgtgcgcctcctctgctgtgacaactatagtcactgtaccacgtcacctctggccaccacatccactgtcccttcttcctctcgcctgtcctctacccacactgccccagctttgaataccacgacttctttccctggggtctctagttccagcgtgccccactcctcttccctggtatctactcacacctcggcagtgttgaccaccctgacttcaactatagccactggtcccattgtgatcccctcctcaacctcagggacccctcacacccctgaagtcttccccagcagtcaggcgaccttcagcgtgtctactgcttcttcctcctcggtgttcagtacctccaggcctactgtcatttccagccaagcatcttccccatcaccctgtttctgccgggcatttggacagctgttcgtacctggggatatcatctacaataagactgatggagctggctgccaattctatgccatctgcaaccagcactgtgatgttgaccgcttccagggtgcctgcccctcctcttcacctccaacgccctctacccctgcgcctttgtctcccctgcttcctggctgtgataatatcacccctccccggcaggtgaatgagtcttggaccctggagaactgcacggtggcccagtgccagggcaacaaccaaatcatcctcctagagccagagcctgtggacaacgtcacgtgtgtcaacaagcacttgcccatcaaagtgtgggaccaggagccttgccatttccactatgagtgtgaatgcttctgcagtggatgggggcactcccactacctgacattcgatggcacctcctatacttttgtggacaactgtacctcagtgctcatgagagagatccaccctcgccatggcaacctgagcatccttgcccacagctactactgtggggccaccacaaatgtcaccttctgtccccgcgccctcagtgtgtactacaactccatggagattgtcctcaccaccaccaccaccaacagtgggaaggaagagagcctgattatatgggaccagatgtggataaggtcgggcttcagtaagaatggcgtgaccgtatctttgagtggggccaccacaatgagtgtcaacatttccaccattggcgccagcatcacctttgatggaaacatcttccagatatggttgccctatagatacttcagcaacaacactgagggccagtgtggtacctgcacaaacagtcagacagacgactgccgccggcctgatggcaccatagcttccgactgccaggacatggccaaagactggctggtgccggggaacaacaacagcgactgcttagctcaacccagcccttcccccagcaccacttcccagcccccaatgtccagcacactgacctccaccacatgcccctctgcgcctctctgtgagctgatgttgagccaggtctttgccgagtgccacaagttcatccctccagacgccttcttcagaacctgtgtcagtgaccactgcaatggcaattttagtaaaacgctctgtcagagcctggaggtctacgcagcgctctgccggatccagggtgtatgtaccgactggcgcaatgccacaggagggctgtgtgacttctcctgtccaccctctaaggagtacaggccttgtggacccatgtatccagcttcctgcagccccaggacccaggaactttcagatgggaccctggcagagggctgcttctgccctgagggtcagctcctcttcaactcacgcacggacatctgtgtgtctgagtgtccctgcgtgggaccagatgggttacccaagcttcctggagaacactggatcagcaactgccaggactgtgtgtgtgaccttggctctgtgtcagtacaatgtgagccggtgaagtgtgagggccaggacaaacccccacagtgcacagaagctggctttgtgactgtgacctggcccagcactgacaatccatgctgccctgagacactgtgtgtttgcaattcaaccacttgcccgagtctgcccaaatgtgaaccagggtacgaactgctccagacccatgagaacggcagctgctgtcccatctccagctgtcgacctaagctgtgtacatacaatgacaccatctatggggtcggtgcaaccttcctagggggtccctgccagatatgcacctgcctctctgtggacaaccaagaacctagagtagagtgtagggagacccactgcaccacctcttgtccccagggctttgagtacacactggtgccagaccagtgctgcgggaagtgtgtacagaatgcctgcctcacaccagagggccaggtggtacagcccaatgaaacctgggtgaacagccctggggacaactgcactacatactattgtagtgctgagaatggagttcacgtactgaccccaatccccacgtcttgccctgatgtgtccaactgtacgggaatcctaaggaaaacgggctgctgttactcctgtgaaagagaggactcaagtacctgtcaagtgcacgtcaacccaaccgtcttgaggcacgagggctgtgagacagaggtcaacatcaccttctgcgagggttcctgctctggaaagtccaagtactccatggaggcccgggccatagagcatcagtgcagctgctgtcaggagaccaaggtccatgatgtagctgcaacattacagtgtcccgatggtacagtcatccagcacacctatacccacatcgacgagtgcaaatgtgccccggcctgcagctccctgcctatgacttccatgactatttcctagagcctcttgctggaaggcaattgcatccccaaccccttatgtccctccacctggagcagaatctgcacaactgaccatgaaaaccttaggcaggtatgctccatgaggcccacaagaaccctctgtggctctcactgcctctgctcctcccctctgcctgccacttggtgagaccagcatcaaagagggggacagggcaattaagattcacctgaggagggtgccaggcgagggtttggtcctgaggagcctgttggctcctttggtctcatcctccgtgagagcctgtggctgtagggctccccacagcaagcctgtgcgccctctgtcacataaagtgagctctgtgtcagtcacctcatgttcacaagggcagatggaactgtccacgcaagaccagctaccagggagctgtatcagacaaggtggctgcctgctggaggggctctggggtctgaggtggaagagggggtctgagctcactcatccctaagcggcaataaaccctggcaccgtg

SEQ ID NO: 402 - RNA, 12342 nt, Rattus norvegicus
  source 1..12342: mol_type = mRNA
cacggtgccagggtttattgccgcttagggatgagtgagctcagaccccctcttccacctcagaccccagagcccctccagcaggcagccaccttgtctgatacagctccctggtagctggtcttgcgtggacagttccatctgcccttgtgaacatgaggtgactgacacagagctcactttatgtgacagagggcgcacaggcttgctgtggggagccctacagccacaggctctcacggaggatgagaccaaaggagccaacaggctcctcaggaccaaaccctcgcctggcaccctcctcaggtgaatcttaattgccctgtccccctctttgatgctggtctcaccaagtggcaggcagaggggaggagcagaggcagtgagagccacagagggttcttgtgggcctcatggagcatacctgcctaaggttttcatggtcagttgtgcagattctgctccaggtggagggacataaggggttggggatgcaattgccttccagcaagaggctctaggaaatagtcatggaagtcataggcagggagctgcaggccggggcacatttgcactcgtcgatgtgggtataggtgtgctggatgactgtaccatcgggacactgtaatgttgcagctacatcatggaccttggtctcctgacagcagctgcactgatgctctatggcccgggcctccatggagtacttggactttccagagcaggaaccctcgcagaaggtgatgttgacctctgtctcacagccctcgtgcctcaagacggttgggttgacgtgcacttgacaggtacttgagtcctctctttcacaggagtaacagcagcccgttttccttaggattcccgtacagttggacacatcagggcaagacgtggggattggggtcagtacgtgaactccattctcagcactacaatagtatgtagtgcagttgtccccagggctgttcacccaggtttcattgggctgtaccacctggccctctggtgtgaggcaggcattctgtacacacttcccgcagcactggtctggcaccagtgtgtactcaaagccctggggacaagaggtggtgcagtgggtctccctacactctactctaggttcttggttgtccacagagaggcaggtgcatatctggcagggaccccctaggaaggttgcaccgaccccatagatggtgtcattgtatgtacacagcttaggtcgacagctggagatgggacagcagctgccgttctcatgggtctggagcagttcgtaccctggttcacatttgggcagactcgggcaagtggttgaattgcaaacacacagtgtctcagggcagcatggattgtcagtgctgggccaggtcacagtcacaaagccagcttctgtgcactgtgggggtttgtcctggccctcacacttcaccggctcacattgtactgacacagagccaaggtcacacacacagtcctggcagttgctgatccagtgttctccaggaagcttgggtaacccatctggtcccacgcagggacactcagacacacagatgtccgtgcgtgagttgaagaggagctgaccctcagggcagaagcagccctctgccagggtcccatctgaaagttcctgggtcctggggctgcaggaagctggatacatgggtccacaaggcctgtactccttagagggtggacaggagaagtcacacagccctcctgtggcattgcgccagtcggtacatacaccctggatccggcagagcgctgcgtagacctccaggctctgacagagcgttttactaaaattgccattgcagtggtcactgacacaggttctgaagaaggcgtctggagggatgaacttgtggcactcggcaaagacctggctcaacatcagctcacagagaggcgcagaggggcatgtggtggaggtcagtgtgctggacattgggggctgggaagtggtgctgggggaagggctgggttgagctaagcagtcgctgttgttgttccccggcaccagccagtctttggccatgtcctggcagtcggaagctatggtgccatcaggccggcggcagtcgtctgtctgactgtttgtgcaggtaccacactggccctcagtgttgttgctgaagtatctatagggcaaccatatctggaagatgtttccatcaaaggtgatgctggcgccaatggtggaaatgttgacactcattgtggtggccccactcaaagatacggtcacgccattcttactgaagcccgaccttatccacatctggtcccatataatcaggctctcttccttcccactgttggtggtggtggtggtgaggacaatctccatggagttgtagtacacactgagggcgcggggacagaaggtgacatttgtggtggccccacagtagtagctgtgggcaaggatgctcaggttgccatggcgagggtggatctctctcatgagcactgaggtacagttgtccacaaaagtataggaggtgccatcgaatgtcaggtagtgggagtgcccccatccactgcagaagcattcacactcatagtggaaatggcaaggctcctggtcccacactttgatgggcaagtgcttgttgacacacgtgacgttgtccacaggctctggctctaggaggatgatttggttgttgccctggcactgggccaccgtgcagttctccagggtccaagactcattcacctgccggggaggggtgatattatcacagccaggaagcaggggagacaaaggcgcaggggtagagggcgttggaggtgaagaggaggggcaggcaccctggaagcggtcaacatcacagtgctggttgcagatggcatagaattggcagccagctccatcagtcttattgtagatgatatccccaggtacgaacagctgtccaaatgcccggcagaaacagggtgatggggaagatgcttggctggaaatgacagtaggcctggaggtactgaacaccgaggaggaagaagcagtagacacgctgaaggtcgcctgactgctggggaagacttcaggggtgtgaggggtccctgaggttgaggaggggatcacaatgggaccagtggctatagttgaagtcagggtggtcaacactgccgaggtgtgagtagataccagggaagaggagtggggcacgctggaactagagaccccagggaaagaagtcgtggtattcaaagctggggcagtgtgggtagaggacaggcgagaggaagaagggacagtggatgtggtggccagaggtgacgtggtacagtgactatagttgtcacagcagaggaggcgcacgtggtagttgtcacaatactgcaaaggtcccgattggttgatatttttgcatatcagcccgaatcgcacatcacacaggaccacctgctgtagagcttccaggggcttgtctggctccttctctgaacggcattggatgtccttgggttgatcacagaagataaagccaacctcacgaagcactgcgtagacctcaaagtccccgcctctggggccagggttggggaagtcggcgtcaaaccactctgtccatttgcagcgaggttcacagcccgagtcaggagatatagtccatgtggaggcttgggtgcttgatacggaagagctggagggatgcttagtctgaaaggtggactccgtgctcgaggacactgaggttgtgaaagggaccaggggcgtaggggtagaccagagcggggatggcttgatggtgctgtaaggggtttcaggacagtggctatagtcatcacagcaaagcacacgtatattgtagttgaagcacattttaaaatcatctgtctgctcctcatttctgcagactagccccgtctccaggttgcagcttactacttgaccaaccttatcaatactcactgcagggtagttctctgcccgacactcaattttctctggtgcctggcacatcttcttgccagaggccctgatgttttcataggtctccatgtccccttttactacccccgatgtcggtgagtccacatcaaaccattcagtccacttacacttgggctggcagtgtgttgtgccctgggaggtggttgcattagtcacggttggtggtagggtatgtgtcattggtacactggtggatggctcttttatgcctgtagtcgtttctagggtggtggacagagattttggggagacagtgccagctgtacccgtatgtacacttgtccagattccagttgacgagatctgttgtgttgtcaagccagatgtcgactgtaatgtctcaggcaaggtcttgggtgttgtatggattgaggaggctcttcccgggctgctggtttccttgatagttgaaacatgtgggggccttgtgccatgggatgtaacaagagtggctgtgtggctagagcctgttagagcttttgagacgcttgttcctactgtggtggaggctgggtgggtactggccacagtcagactagtgttgggaagaggcttaggactcagggtctgagtggcagtagttgctgatcccgtcactgggactgaccctgccgtggtggcagttcccgtcgtcagggccgactctgtagtggtggaagatccctggcagtggatgacactacaacagagcaccttgatcatgtagttgtagcacatcgggaaaatgcctccctggtcccggttgtagcacaccagaccaaggctgacatcacacttcactttctgttgcaagttgtctaaggcctgtccagggtagttctgggccatacacctgatgtccttaggcttctcacagactttttctccattggccctgatattgtcatatgtctctatgtctcctccatcaatgctagaggtaggatagtctacatcaatccactttgtccactcacatttgggttggcaggtggtggaggaggtctcagggctgctgactgtctgtatgaccgtgctggggcttgaagtggacccagtctgtgtgctgggccctactgtggagctggctgaggaaactccagggagctctgaggtggtctcggtatgtggccttgaggacggggtctcagtaaccgctctggtcatggaggcagctgtggctgggtttgtggtagtgctcccaggaggagttctggagggtccaggagtggtcagggaggtagagatggtggccagactcctatttgttgctggggctgaagatgttgtggtgatatggggcctactaggcagcatagagttgcttttggaaatgtcattggtggtcagtgtttgagggttcttcgttgtcattgtggtagaaatgggatgggtggatgtggccatggttgaggtactagaatggaggtctttccacaatgtggtttttgttccagagaccggtttgccaatagaggtggtcagcgtggcagtgctcagaacattggaggaggctgtccacaaacttgtacttggcttacccgagtgtggctcttttgaggtttggagacggctggtgggagaggctggaagtgtagagagactagaggcagagaaactcccagtagtcctagtcgtggtgttggggacaatcttctctgtcctaggggtagagggtctcctttgagttgtgaaagaagttgaggattttggctcctctgatgaccacttgcttgtggacatggggactatgctgggaaatccagttgctggtgtggaagtggtggacagtgacccagttgtgctgatacagctgatatcttcctcacagcagaggacacggatatggtagttgaaacaagtttcattgtcgacctgcttgctattcctacagatgagtccgaagtccacattacaaaccacctcctggcccagttgctggaaggacatgttggggaagaggatggcctcacactcaatgtccacaggtttcttgcatatctcgatacctgtcttgttttgaatatgatagtaggtctcaatgtctcctccaaactggccaggttggggtttgtcactgtccagccaatctgtccaggtgcactgagatttacagcctgtggaagtggtctctgtggttgtgagggctgaggatggaccagtggttagcaaggatgaggtttgagtctccctggatgtcactgtagctgtagaggaagctctggtaaggactgtggttttttcacgggaagaaaatgactctgtagtgctggcgctggtaggcatgctggacacaggccaggaagtgtgtgtggatgtcccagaagtggcagtagtggcagttcccatcgtcggggctgattctgtagtggtggaagatccctggcagtggatgacactacaacagagcaccttgatcatgtagttgtagcacatcgggaaaatgcctccctggtcccggttgtagcacaccagaccaaggctgacatcacacttcactttctgttgcaagttgtctaaggcctgtccagggtagttctgggccatacacctgatgtccttaggcttctcacagactttttctccattggccctgatattgtcatatgtctctatgtctcctccatcaatgctagaggtaggatagtctacatcaatccactttgtccactcacatttgggttggcaggtggtggaggaggtctcagggctgctgactgtctgtatgaccgtgctggggcttgaagtggacccagtctgtgtgctgggccctactgtggagctggctgaggaaactccagggaactctgaggtggtctcggtatgtggccttgaggacagggtctcagtaaccgctctggtcatggaggcagctgtggctgggtttgtggtagtgctcccaggaggagttctggagggtccaggagtggtcagggaggtagagatggtggccaggctagacagggaagtccttgaggttgttgctgagaacgtgttggtagtgtggggactgctgggaagcagggactgcccttgagaggtggacctgatagtcaccacagatgggatgccagaggattctagactcttgggatgctgagtgctcactgaagtgactgtgagaggggtggtgagtggggatgacacacttgtagtcagggttccaggggtgggcaaatctgaagcatctatatgggtggtggaccctgagggagaccaggtctcaactgaatcagtgttgggatgaggcttggaggacagggtctgggtagtgaaagtggcagttcccgtcgtcagggccgactctgcagtggtggaagatccctggcagtggatgacactacaacagagcaccttgatcatgtagttgtagcacatcgggaaaatgcctccctggtcccggttgtagcacaccagaccaaggctgacatcacacttcactttctgttgcaagttgtctaaggcctcttcggggtagttctgggccatacacctgatgtccttaggcttctcacagactttttctccattggccctgatattgtcatatgtctctatgtctcctccatcaatgctagaagtaggatagtctacatcaatccactttgtccactcacatttgggttggcaggtggtggaggaggtctcagggctgctgactgtctgtgtgactgtgttggggcttgaagtggacctggtgtgtgaagtgaattctgctgttgtctgggagctaagcactgtgttctcattggtccctttcactgttgtagtccaggtagggttggacaaggggaggctgctggctgagtttctagatgacgtaggagatgaagtaggtctgctctttgaggcaaacgtcactgtttgccttgagctgtgagttttatccagtgatgtctctttcccacctctggtccaggactgtgattttgaggatgctgtatgagtggtaagtgtgggcagagaggggtttttactggtgtcagactgagagggagtggtactcacacccgaggtcagagaggagccacagggcacataatcacaacacagaaccctcagctcatagttgtggcacagtggggggctctgttcattgttgaagcatctcaacccagaggataggtcacagtttaccttctgacccagcttctctaagtccaggctggggaacttcactgctcggcattcaatggcaacgggggtttgacacacctggtaccctttcctcctcaggttctcaaatgtttcaaagtccccgcctaacatgccagcctctggatggctctcatcataccaactggaccagtggcagacctcacgaacacacacagtagacgcagtggaagctgaaccgtttgtggtaaggggtgtcagagtggtggtgaatatgaatggtgtggtagacgggacttcagggcactcttcagtcgtgcgttttatagtcccgttgtctttgcagatggctactaagcaggcaccgaggccatcagtggtgttgtagacaacatcattgtagttgtaggtacggccctcatagatgcatgtgcaggctgtaaggttgtaagcacactggaggccaccaggggtgcagagacaactctggcagttctcagctgtagggacctgtgtgccaatgtcatgatagtttccgtcatcatcatagcagccacactgggccacacacttcatctggtcttcattgaagaagggctggctgggtggacactgtgggtagcagccttctaggcctggcaggtcaaccaggcagtgtccagatggattccgacaggtcttcagacagggggctccacagggctgataatgccactcacattgcccatgagggttgtagtagtcacagaaaagagggcagatgtctggagtcctccaggacaagcacacacccacatcacggcaggcctgggcgtaggcggccacggcagtgcagaagcactcacagtcacctcctgagtcacaggcacacacatcatgcacacaggcttcgtagtattttgtagagtcaacctgagagtggcaggcagcgaaagttgcgctgttgatgatgctacattttttctgggcccaggacttgcggtaagggttggcgatgcagggatccttgggaactggggcatccgggcaggatggggagaacttccagctatttccaaactccagcacatcacccaccacagactggctgcgtgtggtgaagtcattgatggcattgtcatcaaagttcccacacaggccgcagaccctacccttataatgctgctgcagccggacaaacacactggtcttcctgtcccaggacacgactatcccactccggatctcaatgaccaggaagatgcccatgtatctgatcttgtacggagggtccccacttggccctcgcgctaccaccttaaagttcccctcatgaaggatcagctcatagctctccacaaagatcttgatggccttggagcaggtggttcctgtggtcccacaggggacattctcagtgacaatacggaaggtcccatcagtactggtgttgcctctgcagtagtcttgagccaaggtatactcgcagttgccttcaaagatgtaacgttcaccatcaaaggtaacaaagtggccgtccccataggctacacaggcacccatgcagggctggttggtgcattcccaccggcggttccggcaggtgcagttattgcagtctacccgaatgatctccccaggtctgtatgtggcctcattgtgtacgcaggggcagtcctcctcagcaatgcagcccccattcccatctgctaccagccctgagggacacacgcagcccgagacacattgtgtgctgaagcaatccacatccagcgtgtggcagcttctgaggcattcagccccgtggtcacccactgaggcattgttacagtccaagtataccataggtgcctggcactctttgtttctctgcatcagggctcccaggcaggtcaacttcccatttgtacacgagcacaccacaccgttgtccataacaacctctccggaagccaccacggttccatggaagtagcaggggcactcctccactgggacacagtggtccttgtcattcaggaaggtaccttcagggcaggtgcaaccatccacaggcacaaaggggatgctgcaggtgacgtcaacctcacttagagagcggcacgtaggctggcaagtactcactgagtaggagtactccttggtttgggggcagttgttcatgtacttgtagcaggctttgcccctccagccactgagcagcacgcctttggcagcacaggcacgcacgtaggaggacagggcggcacacatgcagtcctcgctattctcacagttgcacgtgtcaaacaagcagttcgagtagaagggcaccgggctaacagtggcatggcaggctgagaaaactcctgagctttcagtgagcatcgagcaccactcccgagcgaagttctcgttctccacactgtatgagcaggggtcttcataggtgttcttggagttggggcaggaggcttgagtcttccaggtgttggagaaggctgcccctgtgccctccaccaccccactgagggccgtgaagtcatcggcctggttctggttgaagtttccacacaggccacacatctggccttggtaggagcggtccagcctgacaaacacctgcatgaagggcaccagctgcacttgcagctgcagccccgtgcccacctgtactataacgaagaaggatgatggcctgaagatggtgacgttgcctgctgacaagggcagttgagtgaaaatggagttcaggaacacagcaccgttgacctggatcctgacgaccatgtccccgctattgaggctcagcgtcactgctttgaggcagttctcggtgtccgtcattccacacttccgaagatccaccagcacagtgaagctgctatctgcacatttcttggtcaggatgtagctgcagtctccatgcacattgtagagtttctcatcaaaggtggagatgtgggacccgccttgcacagagcaggtgccggggcacggcaggtcctggcactgccacagtcccccgaagcaggtgcaggagctacaggtggtgttgaaggactctccaggggcataaatgtggccaccgtgggtacagtggcactgttccaggggcaggcagcccaaatgtctgacatcatccagcacagttcctgggggacagaagcagccatccatgcagtggtcctcgcacagttgagagcgctgggggttggagcaggtatccacacagggtgagctgcactcttggtattccatgttgaaagggcaggtccagttgcagagatcggaacgcctccagttctgtgggtggccccctgcatgggcacactggcgggaatattcagcaaaagtggcacatgggcaggtggggcagcggcacaggtcctggacacaggcatccaggtacacgttgacgtctaccagggcgatgcactcggcaaaggcagggccaagcaggatgtgacggcagatgccctccgtatctgtgcagttgttggcaggtgacagtaggacatcctggcactgttctgtgggaccatccagcttctgcaggtttccaaactggacaggggtcagcctagtgttgtgggcgtagaactcattgacagctgggagcccgttgaagtcaccgcacagcccacacgtctggttggtgtatttggagtccagttccagcaggacactgtcttcttcattccacaggaagttgaggactagcctgatgctgatcttcacatagccactggtcttctccatcagaagacctgcacggctgtagggcagctcctcccgatgtccgtttaccaggacagagccattagacagctcaatcaccagtccctgggccctgaggaacacataggtgaccgtgggcctggaaccctcaagaccacgacgtaattggatgttgaagtcctcgtaggtggccccgcagtgtgaagagaagacatagttacagaggccagggaagcggaacacgtcaccatcgaaggtcttataatggaagtcaccccacgtgctgcacactctcccgttgtgtgccaggtgtaaggcacttatgcttgggaagacagagataggtgggatgaaggtgacatgccgtgcggatgaggatgtgggggcactatacactttctgactgtctccggtgagttctggatgttctgcgctcagctcttcctggccctggctctctgctggccacaccatgagcaaggccacagaagcccagaccagagcccagctccaattcctgccgcccatcctgggggcagtacagagggcaggcaggagggactaagacaaggcac

SEQ ID NO: 403 - RNA, 19765 nt, Macaca mulatta
  source 1..19765: mol_type = mRNA
cccagttccctccctgcccgtccgtgccccccacctgtgccagtccccaggatgggtgccctgagcacgtgccggacgctggtgttggctctggcggccgtgctcctggtgcagcaggcagagacccagggccctgcggagccgagctggggcagtgcagggcacaccacagatggcggtgccccgatggcctcgcccacccggcgtgtgagctttgttccacccgtcactgtcttccccagcctgagccccctgaacccggcacacaacgggcgggtgtgcagcacctggggcgacttccactacaagaccttcgacggtgacgtcttccgcttccccggcctctgcaactacgtgttctccgagcactgcggcgccgcctatgaggacttcaacgtccagctacgcagaggcctggtgggctccaggcctgtggtcacccgtgttgtcatcaaggcccaggggctggtgctagaggcgtccaatggctctgtcctcgtcaacgggcagcgggaggagctgccttacagccgcactgggctcctggtggagcagagtggggactacgtcaaggtcagcatccggctggtcctgaccttcctgtggaacggagaggacagtgccctgctggagctggaccccaaatacgccaaccagacctgtggcctgtgcggggacttcaacggcctcccagccttcaacgagttctatgcccacaatgccagactgaccccgctccagtttgggaacctgcagaagttggatgggcccacggagcagtgcccggacccgctgcccttgccagccagcaactgcacagatgaggaaggcatttgccaccacaccctgctggggccggcctttgcggagtgccatgcactggtggacactgccccgtacctggctgcctgcgcccaggacctgtgccgctgccccacctgcccgtgcgccacctttgtggaatactcacgccagtgcgcccacgcggggggccagccgcagaactggaggcgccctgagctctgcccccggacctgccccgtcaacatgcagcaccgggagtgtggctcaccttgcgtggacacctgctccaacccccagcgcgcacagctctgcgaagaccactgcgtggacggctgcttctgccccccaggcacggtgctggatgatgtcacgcactctggctgcctgcccctcgggcagtgcccctgcacccacggcggccgcacctacagcccgggcgcctccgtcaacaccacctgcagctcctgcacctgctctggggggctgtggcagtgccaggacctgccgtgccctggcacctgctccgtgcagggcggggcccacatcaccacctacgacgagaaactttacgacctgcatggcgactgcagctacgttctgtccaagaaatgtgctgatggcagcttcaccgtgctggccgaactgcggaagtgtggactgacggacaacgagaactgcctgaaggccgtgacgctcagcctggacggcggggacacggccatccgggtccaggcagacggcagcgtgttcctcaactccatctacacgcagctgcccctgtcggcagccaacatcaccctgttcacaccctcgagcttcttcatcgtagtgcacacaggcctcgggctgcagctgctggtgcagctggtgccgctcatgcaggtgtttgtcaggctggaccccgcccaccagggccagatgtgcggcctgtgtgggaacttcaaccagaaccaggctgacgacttcgcagccctcagtggggtggtggaggccacaggcgcagccttcgccaacacctggaaggcccaggccacctgcaccagtgccaggaacagctttgaggacccctgctccctcagtgtggagaatgagaactacgcccggcactggtgctcacgcctgactgaccccaccggctccttctcgcgctgccactccgtcatcaaccccaagcccttccactcgaactgcctgtttgacacctgcaactgtgagcggagcgaggactgcctgtgcgccgcgctgtcctcctatgtgcacgcctgtgccgccaagggcgtgcagctcagcggctggagggacggcgtctgcaccaagtacatgcagaactgccccaagtcccagagctatgcctacgtggtggacgcctgccagccgacttgccgaggcctgagtgaggccgacgtcacctgcagcgtttcctttgtgcctgtggacggctgcacctgccccacgggcaccttcctcaatgacgcgggcgcctgtgtgcccgcccgggagtgcccctgctacgttcacggcaccgtgctggctcctggagaggtcgtgcacgacgaaggcgctgtgtgttcgtgtgagggtgggaagctgagctgcctgggagcctctctgcagaaaagcacagggtgtgtggcccccatggtgtacctgaactgcagcaacagcttggcgggcacccctggggccgagtgcctccgaagctgccacacgctggacgtgggctgtttcagcacacactgcgtgtccggctgtgtctgtcccccggggctggtgtcagatgggagtgggggctgcatcgccgaggaggactgcccctgcgtgcacaacgaggccacctacaagcctggagacaccatcagggtcgactgcaacacctgcacctgcagaaaccggaggtgggagtgcagccaccggctctgcctgggcacctgcgtggcctacggggatggccacttcatcacctttgatggcgagcgttacagctttgaaggcagttgcgagtacatcctggcccaggactactgtggggacgacgccacccacgggaccttccgcatcgtcaccgagaacatcccctgtgggaccaccggcaccacctgctccaaggccatcaagctcttcgtggagagctacgagctgatcctccaggagggtgcctttaaggcagtggcgagggggccgggcggggacccgccctacaagatccgctacatggggatcttcctggtcatcgagacccgcgggatggccgtgtcctgggaccggaagaccagtgtgttcatccgactgcaccaggactacaagggcagggtctgcggcctgtgcgggaacttcgacgaccatgccatcaatgactttgccacgcgtagccggtctgtggtgggggacgcactggagtttgggaacagttggaagctctccccgtcctgcccagacgccctggcgccgaaggacccctgcacggccaaccccttccgcaagtcctgggcccagaagcagtgcagcatcctccacggtcctaccttcgccgcctgccgctcccaggttgactccaccaagtactacgaggcctgcgtgaacgacgcgtgtgcctgtgactcgggtggtgactgcgagtgtttctgcacggctgtggctgcctacgcccaggcttgccacgacgcgggcctgtgtgtgtcctggcggactccggacacctgccctttgttctgtgacttctacaacccacacgggggctgtgagtggcactaccagccctgcggggcaccctgcctaaaaacctgccggaaccccagtgggcactgcctggtggacctgcctggcctggaaggctgctacccgacgtgcccacccagccagcccttcttcaatgaggaccagatgaagtgcgtggcccagtgtggctgctacgacagggatggaaactactatgacgttggcgcaagagtccccacagcggagaactgccagagctgtaactgcacgcccagtggcatccagtgcgctcacagccttgaggcctgcacctgcacctatgaggacaggacctacggctaccaggacgtcatctacaacaccaccgatgggcttggtgcctgtttgatcgccatctgtggaagcaacggcaccatcgtcaggaaggctgtggcatgtcctggaactccggccacaacgccattcaccttcaccactagctgggtcccccactccacgacaagcccggccctcccagtctccactgtgtgtgtccgcgaggtctgccgctggtccagctggtacaacgggcaccacccagagcctggtctgggaggcggagacttcgagacatttgaaaacctgaggcagagagggtaccaggtgtgccctgtgccagccgacatcgagtgccgggcagggcagcttcccgacatgccactgggagagctgggccagcaggtggactgtgaccgcgtgagggggctgatgtgcgccaacagccagcagagccccccgctctgtcacgactatgagctgcgggttctctgctgtgaatacgtgccctgtggcccctccctggccccaggcaccagcccccagccctccctcagtgccagcacggagcctgctgtgcctacccctacccagaccacagcaaccgaaaagaccaccctgtgggtgatcccaagcatccggtcaacagcagccctcacctcacagactgggtccagctcaggccccacgacggtcacctccctggccccaggtaccaccacctgccagccccggtgtcagtggacagagtggtttgatgaggactaccccaagtctgaacaacttggaggggacgttgagtcctacgataagatcagggctgcaggagggcacttatgtgagcagcctaaggacatagagtgccaggccgagagcttccccaactggcccctggctcaggtagggcagaaggtgcactgtgacgtccgcttcggcctggtgtgcaggaactgggagcaggagggcatattcaagatgtgctacaactacaggatccgggtcctgtgctgcagcgccgaccactgcaggggacgagccacaaccccaccaccggccacatcgctggagacggccaccaccaccacccaggtcctgttctcaacgctgcagtcaacgagtagcctgggggtgaccagcaccacagcagtccccaccctctcaaaaggactgacatcccccagatacacgggcacccttggtacagccaccacaggaggccccacggttcctgcaggctccacagaacccactgtcccaggggtggccacatccaaccttccaacacactcagtcctgccagggaccacggggagttcgggcacatggcatccctcacagccacccacgccagccccaacgacaatggcaacctccagagctcacctgacaggcacagccagctccagctccaaacagccgctgaccacgagcctggcgccgacactctcgagcgaactgttcacctctcaggccgagaccagcacccccaggacagagacgacactgagccgcttgactgagaccaccactagccagagcactacccgctgtcaaccgaagtgtgagtggacagagtggtttgacgtggacttcccaacctcaggggtcgcaggcggggacatggaaacttttgaaaacatcagggctgctgggggcaagatgtgctgggcaccaaagagcatagagtgccgggcggagaactaccccgaggtgagcatcgaccagatcgggcaggtgctgacctgtagcctggagacggggctgatctgcaagaatgaggaccagacaggcaggttcaacatgtgcttcaactacaatgtgcgtgtgctctgctgtgacgactacagccactgcccccacacagccgcccccacgcccacctcctccacacaggcacccagactcacctccatgggggccaccagccccacagtgactgcctccacagccattgcaacctggagcaccaagtcaccagcagtaacaggatcctcaactctggccaccactcaaactggccccagcttctccaagaccacagagagggtgtccctccccagtccctctgcccctttaccttccaccgccagcctcctccctaccagggagcagcagacctcccaggctccatccatgcccaccagtccaattgtgaccagcacccccacaacgtcccccgtggtgaccgcccgtgtgcacacaaccctgcggacttccagctctgggcccaccatcaggacgaccctgccctctggccccccgtctcccagcacgggctgtgtgcctcgctgcacctggacagactggtttgatgaggactaccccagctctgaccctgatggcggggactttgagacctttggggtcatccgctctgctggccataccttctgcgagcatccatgggacattgagtgccgctctgagaaggagcccaaccaacccctggaggccctggggcaggtggtgcagtgtgatgtgagcattgggctggtgtgtaggaaccgtgaccagtctgggcccctgtggtactgccacaactttcatgtgcggctgttgtgctgtgatgacagccactgtgccagcactcccacgagcaccggatccacggctaccactcccacaagcaccggatccacggctaccactcccacgagcactggatccacggctaccactcccatgagcaccagatccacggctaccactcccacgagcactggatccacagttaccgtacccatgagcaccggttccatggctaccactcccacgagcaccggatccacagttaccgtacccatgagcaccggatccacggctaccactcccacgagcaccggatccatggctaccactcccacgagcaccggatccacggctaccactcccacgagcaccggatccacggctaccactcccacgagcaccggatccacagttaccactcccacgagcaccggatccacagttaccgtacccatgagcaccggttccacggctgccacacccaggagcacaggcaccacagccaggcgctcctccaccccaggaacagctcacactgtgaaagtgctgaccaccacagccatcacaacccaggccaccagctccacagccaccccctcctccacctcaagcactgctcagagccccaaagggttgaccaccacagccaccacaactgtggctgccagctccacggtgacttcccaccccccagcaggaaccaccggtaccaccctgggtggtaccaccttgatcttcacagagccaaccactaaagccaccatgaccacgcccaccagctccatggccaccgcctcctccagccaaggaacagctcacaccccaaaagtgctgagcaccacaaccatcacaaccatggccaccacctccaaagccaccccctcccacaccccggcaactgctgccaccccaaatgtgctgaccaccatgaccacaacacccacagtcaccggctccaaagccattccctcctccagtccagggactgcacccacccttccagcactgacaagcacagccaccacacccacagctacaagctttacagccatcccctcttcctctctggggaccacctggaccctcacagcacagaccaccacacccacagccaccatgtccacaggcagaccctcctccactccagagactgcccatatttccacagtgcttaccaccacggccaccacaactggggccactggctccatggccaccccctcctccagcccaggaacagcttacactaccaaagtgctgactaccacaaccaggggcttcacagccactccctcctctagcccagggactgcacccacacttccagggcggatcggcacaaacaccacacccacaaccagcggctccatggtgaccccctcctccatcccagggaccacccacacccccacagtgctgaccaacaccaccacaaccgtggccactggctctatggtaacaccctcctctagcccacagaccactggtacacccccagcactggccaccacgggcacgacaatcacggccacaggctccaccaccaccccctcctccgctccagggacaactcccatctccccagtgctgaccaccacggccaccacacctgcagccaccagcaccacagtggctccctcctctgccctagggaccacccatacacccccagtgctgtccaccatggccaccacacatgggcgatcccagctccctgagagtccccgcatggtacccacagcctggacttccatggccacctcgggcgccacccacatcacagagccatccacggtgacttcccacaccccagtaggaaccaccggtaccaccccacactcgactccagccctgtccagccctcacactcacagcagaaccactgagtcacccctttctccagggaagaccaccccgggcctcaccacggccacctccaggaccacggccacggccacaaccagcgagacccgtgcctcgaccctgctgtccagcagccccacatcggcccccacgaccccggtggtgtccacaggctgtgagccccagtgtgcctggtcagactggctggactacagctaccccatgtcggggccctctggcggggacttggagacctactccaacatccgcgcggctggaggggccgtctgtgagcagcccctgggcctcgagtgccgcgcccaggcccagcctggtgtccccctgcgggagttgggccaggtcgtggaatgcagcctggacttcggcttggtctgcaggaaccgtcagcaggtggggaagttcaagatgtgcttcaactacgaaatccgtgtgttctgctgcaactacggccgctgccccagcaccctggccaccagctccaaggccacaccctcctccactctggagacaaccgggatcctcacagagccaaccactacagccatcacaacagtggccacgggctccacagccatgccctcctccactccagggaccaccgcgatcctcacagagccaaccactacagccatcacaacagtggtcacgggctccactgccatcccttcctccacctcagggactactcaaatcaccaaagtgtttcccaccacaactgcaacgactgaagccactggctccacggccaacccctcctccaccccagggaccaccggctccacagccacctcctcctccactcctgggaccacctggatcttcacagagccaaccacaacattgaccacgaatgtggccaccagctccacagtcaccccctcctccaccccagcaactgctgccacctcagaattgctgaccaccatggccacgaaacccacagccactggctccaaagccactgcctccaccagtccagggactgcacccacccttccagttgtgctgacaagcacagccaccacacccacagctaccagctttacagccatcccatcctcctccctgagaaccacttggaacctcacagcacagaccaccgcaccaacggccaccctgtccacagcccacgcctcctccactccaaggaccacccacacctccacagcgctaaccaccacggccaccacaatccaggccactggctccacggccaccctcctcacctcaggaacagctcacacctctaaagtgctgaccaccatggccatcaccacaagctccacagccaccccctcctccagcccagggactgcaagcacccttacagcacttatcaccacaaccaccacacccacaaccagcagctacacagtgaccccctcctccatcccagggaccacccacaccccgacagtgctgaccaacaccaccataactgtggccactggctctatggcaacaccctcctctagcccacagaccactggtacacccccagcactggccaccacgggcacgacaatcacggccacaggctccaccaccacccccgcctccactccagggacaactcccatctccccagcgctgaccaccacggccaccacacctgcagccaccagcaccacagtggctccctcctctgccctagggaccacccatacacccccagtgctgtccaccacggccaccacacatgggcgatcccagctccccgagagtccccgcacggtacccacagcccggacttctgtggccacctcgggcaccacccacatcacagagccatccacggtgacttcccacaccccagtaggaaccaccggtaccaccccacactcgacttcagccctgtccagtcctcacactcacagcagaaccactgagtcacccctttctccagggaagaccaccccgggcctcaccacggccacctccaggaccacggccacaaccagcaagacccacacctcgaccctgctgcccagcagccccacatcggcccccacaaccccagtggtgtccacgggctgtgagccccagtgtgcctggtcagactggctggactacagctaccccatgtcggggccctctggcggggacttggagacctactccaacatccgcgcggctggaggggccgtctgtgagcagcccctgggcctcgagtgccgcgcccaggcccagcctggtgtccccctgcgggagttgggccaggtcgtggaatgcagcctggacttcggcttggtctgcaggaaccgtcagcaggtggggaagttcaagatgtgcttcaactacgaaatccgtgtgttctgctgcaactacggccactgccccagcaccccggccaccagctccaaggccacaccctcctccactctggggtcaacctggattctcacagagccaaccactacagccatcacaacagtggccacgggctccacgaccatcccctcctccactccagggaccaccgcgatcctcacagagccaaccactacagccatcacaacagtggtcacgggctccacagccattccctcctccactacagggactactcgaatcactgaagtttttcccaccacaaccgcaatgactgcagccactggctccacggccaacccctcctccaccccaggaaccacctggatcttcacagagccaaccaccactgccaccataactgtggccactggctccaaggccacgccctcttccactccagcatcaacctggattctcacagagccgaccactacagccgtcacaacagtggccacgggctccacggccatgccttcctccactcaggggacgaccgggagcctcacagaaccaaccaacactgccaccataactgtgaccaccagctccacagccatgccctcctccactccagggatgacctcgatcctcacagagccgaccactacagccattacaacagtggccacgaggtccacggccacgccctcctccactccggagacggccaggatcgtcacagagccaaccaccactgccaccataactgtggccaccagctccacagccacgccctcctccactccagggacgaccttgatcctcacagagccgaccactacagccatcacaacagtggccccgggctccacagccacgcccacctccactctggggacgaccgggatcctcacagagccaaccactacaaccatcacaacagtggccacaaggtccacggccacgcattcctccactccggggacaaccgggatcctcacagagccgaccactacagccatcacaacagtggccccgggctccacagccacgccctcctccactccagggaccactgggatcctcacagagccaaccaccactgccaccataactgtggccactggctccacggccatcccctcctccactccagggatgacctcgatcctcacagagccaaccactacaaccatcacaacagtggccacaggctccacggccacgcccacctccactccggggacgaccgggatcctcacagagccaaccactacaaccatcacaacagtggccacgaggtccacggccacgccttcctccactccggggacaaccgggatcctcacagagccgatcactacagccatcacaacagtggccacgggctccacggccatcccctcctccactccagggatgacctcgatcctcacagagccaaccactacagccatcacaacagtggcccctggctccacagccacgccctcctccactccggggacgactgggatcctcacagagccaaccaccactgccaccataactgtggccactggctccacggccatcccctcctccactccagggatgacctcgatcctcacagagccaaccactacagccatcacaacagtggccacgggctccatggccacgcccacctccactccggggacgaccgggatcctcacagagccgaccaccactgccaccataactgtggccactggctccacggccatcccctcctccactccagggatgacctcgatcctcacagagccaaccactacaaccatcacaacagtggccacgaggtccacggccacgccttctactccggggacaaccgggatcctcacagagccgaccactacagccatcacaacagtggccacgggctccacggccatcccctcctccactccagggatgacctcgatcctcacagagccaaccactacagccatcacaacagtgaccacgggctccacggccacgccctcctccactccggggacgactgggatcctcacagagccaaccactacaaccgtcacgacagtggccacgaagtccacggccgtgccctcctccactccagggaagacctcagtcctcacagagctgaccactacagccatcacaaccacgggctccacggccacaccttccactccggggacgactgggatcctcacagagccgaccactacaaccatcacaacagtggccacaggctccacagccctgccctcctccactccggggacgactggattcctcacagagccaaccaccactgccaccataactgtggccactggctccacggccatcccctcctccactccagggatgacctcaatcctcacagcgccgaccactacagccatcacaacagtgaccacgggctccacggccacgccctcctccactccagggaagacctcaatcctcacagagctgaccactacagccatcacgacagtggccacgggctccacggccacgccttccactccggggacaaccaggatcctcacagagccgaccactacagccatcacaacagtggccccgggctccacagccatgccctcctccactccggggactactgggatcctcacagagccaaccactacaaccatcacaacagtggccacgaggtccatggccatgccttcctccactccggggacgaccgggatcctcacagagccaaccactacaaccatcacaacagtggccacaaggtccacggccacgcattcctccactctggggacaaccgggatcctcacagagccgaccactacagcgatcacaacagtggccacgggctccacggccatcccctcctccactccagggataacctcgatcctcacagagccaaccactacagccatcacaacagtggccccgggctccacagccgcgccctcctccactccggggacgactggaatcctcacagagccaaccaccactgccaccataactgtggccactggctccacggccatcccctcctccactccagggatgacctcgatcctcacagagccaaccactacagccatcacaacagtggccacgggctccaaggccaagcccacctccactccggggacgaccgggatcctcacagagccgaccaccactgccaccataactgtggccactggctccacggccatcccctcctccactccagggatgacctcgatcctcacagagccaaccactacagccatcacaacagtggccccgggctccacagccacgccctcctccactccggggacgactgggatcctcacagagccgaccaccactgccaccataactgtggccactggctccacggccatcccctcctccactccagggatgacctcgatcctcacagagccaaccactacaaccatcacaacagtgaccacgggctccacggccacgccctcctccactccagggaagacctcagtcctcacagagctgaccactacagccatcacgacagtggccacgggctccacagccacgccttccactccggggacaaccaggatcctcacagagccgaccactacagccatcacaacagtggccccgggctccacagccacgccctcctccactccggggacgaccgggatcctcacagagccaaccactacaaccatcacaacagtggccacaaagtccacggccacgccttcctccactccggggacgaccgggatcctcacagagccaaccactacaaccatcacaacagtggccacaaggtccacggccacgcattcctccactccggggacgactgggatcctcacagagccgaccaccactgccaccataactgtggccactggctccacagccatcccctcctccactccagggatgacctcgatcctcacagagccaaccaccacagccatcacaacagtggccacgggctccacggccacgcccacctccactccggggacgactgggatcctcacagggccgaccaccactgccaccataactgtggccactggctccacggccatcccctcctccactccagggatgacctcgatcctcacagagccaaccactacagccatcacaacagtggccacgggctccatggccacgccttctactccggggacgactgggatcctcacagagccaaccactacagccatcacaacagtgaccacgggctccacggccacgcccacctccactccagggacgaccgggatcctcacagagccaaccactacaaccatcacaacagtggtcacgaggtccacggccgtgccttcctccactccagggatgacctcaatcctcacagagccaaccactacagccatcacaacagtggccacgggctccacggccacgcccacctccactccagggacgactgggatcctcacagggccgaccaccactgccaccataactgtggccactggctccacggccatcccctcctccactccagggatgacctcgatcctcacagagccaaccactacagccatcacaacagtggccacgggctccacggccacgccttctactccggggacgactgggatcctcacagagccaaccactacagccatcacaacagtgaccacgggctccacggccacgcccacctccactccagggacgactgggatcctcacagagccaaccactacaaccatcacaacagtggccacgaggtccacggccgtgccttcctccactccagggatgacctcaatcctcacagagccaaccactacagccatcacaacagtggccacgggctccacggccacgccctcctccactcaggggacgaccgggatcctcacagagccaaccactactaccgtcacaacagtggccacgaagtccacggccgtgccctcctccactccagggaagacctcagtcctcacaaaactgaccactacagccatcacaaccacgggctccacagccacagcttccactccggggacgactggattcctcacagagccaaccaccactgccaccatcactgtggccactggctccatggccatcccctcctccactccagggacgacctcgatcctcacagcgccgaccactacagccatcacaacagtgaccacgggctccacggccacgccctcctccacttcagggaagacctcaatcctcacagagctgaccactacagccattacgacagtggccacgggctccacggccatgccttccactccggggacaaccaggatcctcacagagccgaccactacagccatcacaacagtggccacgggctccacagcctcaccctccttcactccagggacaaccgggatcctcacagagccgaccactacaaccattacaacagtggctatgaggtccacggccacgccctcctccactctggggacgaccgggatcctcacagagccaaccactacagccatcacaacagtggccacaggctccacggccataccttcctctactctgggaacgaccaggatccacacagaaccaaccaccactgccaccataagtgtggccaccagctccacagccacgccctcctccactccggcgtcaacttggttcctcacagagccgaccactacagccatcacaactatggcctcgggctccacagccaccctgacctccaccccgggaacaacgtactctcccaaagtgttgaccatcacagccaccacacccacagccaccagctccaaagcaaccccctcctccactctggggacgacctggatcctcacagagccgaccactctagccaccccgactgaggccactggttccacagccaccatacccacagcgcccagctcctcagcaacccctttctccagcccagggactgcaggcacccttccagtgcggaccactacagcaaccacgaccatggccactaggtctactgccatcccctcctccactgtgggaacagctggcacccccaaagtgctgaccaccacggccaccaggcccacagccactggctccacggttcccagctcgtccaccctggggaccacccacacccctgcagtgctccccagcagcctgccagccttcagcatgtccactgtgtcctcctcagtcctcaccaccctcagacccactcacttccccagctcccacttctctactccctgcttctgcagggcatttggacagttcttctcacctggggaagtaatctacaataggacagaccgagccggctgccaattctatgccgtgtgcaaccagcactgtgacctcgaccgcttccagggcacctgccccacctccccaccaccagcgtcctccaccctgctgccctcgccctcccctgcccctggctgtgacaatgccatccctccccggcaggtgaatgagacctggaccctggagaactgcacggtggccaggtgcgtgggtgacaaccatgtcgccctgctggacccaaagcccgtggccaatgtcacctgcgtgaacaagcacctgcccatcaaagtgtccgacccgagccagccctgtgacttccactatgagtgcgagtgcatctgcagtgtgtggggcagttcccactattccacctttgacggcacctcttacacctttgagggcaactgcacctatgtcctcatgagagagatccacgcacgcctcgggaatctcagcctctacttggacaaccactactgcgcggcctctgccgctgccgccagctgctcccgcgccctcaggctccactacaagtccatggatatcgtcctcaccgtcaccacggtgcatgggaaggaggaggacttgatcctgtttgaccaaattccggtgagcagcggtttcagcaagaacggcgtgcttgtgtctgtgacggggaccaccaccatgcgcgtggacatccctgccctgggtgtgagcgtcaccttcgatggccacatcttccaggcccggctgccctacagcctcttccacaacaacaccgagggccagtgcggcacctgcaccaacaaccagagggacgattgtctccagcgcgacggaaccactgccaccagctgtaaggacatggctaagacttggttggtccctgacagcagaaaggacggctgctgggccccgaccggcacgccccccacggccagtcccccggccccggtgtctagtgcacccacccccagcccgtgcccgccgcagccactctgtgatctgatgctgagccaggtctttgcccagtgccacgaccttgtgcccccgggcccattcttcaatgcctgcatcagcgacggctgccagggccaccccgaggtgccctgccagagcctggaggcctacgcagctctttgccgtgcccggggagtgtgcagtgactggcgaggtgcaaccggcggcctgtgcgatctcacctgcccacccaccaaagtgtacaagccgtgcggccccatacagcctgcctcctgcaactccaggaaccagaacccacaactggaggggctggcggagggctgcttctgccccggggaccagatcctcttcagcgcacacacgggcacctgcgtgcaggactgcccctgcgtgggacctgatgggcttcccaagtctcctgggcagcagtggatcagcaactgccagtcctgcgtgtgtgatgagggttcaatgtcggtgcaatgcaagcccctgccctgtgaggcccagggtccctcctcaccatgcagccaccccggtttcgtgaccgtgaccaggccccgggccaacaacccctgttgccccgagacggtgtgcgtatgcaacacaagcacctgccaccagagcccacccgtgtgcccgctagggcaggagttgatcagcacccagaaggagggcgactgctgtcccaccttccgctgcggacctcagctgtgttcctacaagggcatcttctatggggttggtgcaatcttcccaggggcccttccctgccacacgtgtacctgcctctctggggacacccaggacccaacggtgcaatgttgggaggatgcctgccacaatactacctgcccccagggctttgagtacaagagagcggccgggcagtgctgtggggagtgcgtgcagactgcctgcctcacgcccgatggtccgccagtccagctgaacgaaacctgggtcaatagccgtgtggacaactgcaccgtgtaccactgtgaggtcgagagcggagtctatttgctgaccccacagcctgcatcctgcccagaagtgtccagctgcagggggagcctcaggaaaaccggctgctgctactcctgtgaggaggactcctgtcaggtccgcgtcaacacaaccgtcctgtggcaccagggctgcaagactgaggtcaacatcaccttctgtgagggctcctgccccggagagtccaggtactcggcagaggcccaggccatgcagcaccagtgcacctgctgccaggagagacgggtccacgaggagacggtgcccttgcgctgtcccgacggctcgactgtcctgcacacctacaaccatgtggatgagtgtggctgcacgccattctgtgtccctgcgcccatggctcccatatacccccccggcttcctggcccaggaggccactgccgtctgaggatgttctgcctccatccccatgctctgtccacctggagccaggacgtgcattgcctgatcatgaaaaccttgggcctgctctgcggagccccctggcctctgtgtgtggcaccccgtgcctctgtgctcctgctgcccaccctgtgggtaaaaccggaccctggaagggtgaggggccagcaggacccctttcaggagggcaccactcaggagtcatgtcctgggagagcctgtggcccaccttggccttgcccctccttgatgtcactgggacgccctggaacaagctaagcgtgtgcgggcctgtgtgtccctgccatggccagagtccccaggcagcatggattctggctggccacatccggccactggggcacagacaggctggtccaggcaaggccggctgctgccaggaagctgcgctagacctgcctgctgcagggtacctcggggctgaggtcacaatggccaggtcagagagaggtcggcatcccaaagccccctctgctcaacccagcccagttttgcaaataaacgctgagcatcgagta

SEQ ID NO: 404 - RNA, 19765 nt, Macaca mulatta
  source 1..19765: mol_type = mRNA
tactcgatgctcagcgtttatttgcaaaactgggctgggttgagcagagggggctttgggatgccgacctctctctgacctggccattgtgacctcagccccgaggtaccctgcagcaggcaggtctagcgcagcttcctggcagcagccggccttgcctggaccagcctgtctgtgccccagtggccggatgtggccagccagaatccatgctgcctggggactctggccatggcagggacacacaggcccgcacacgcttagcttgttccagggcgtcccagtgacatcaaggaggggcaaggccaaggtgggccacaggctctcccaggacatgactcctgagtggtgccctcctgaaaggggtcctgctggcccctcacccttccagggtccggttttacccacagggtgggcagcaggagcacagaggcacggggtgccacacacagaggccagggggctccgcagagcaggcccaaggttttcatgatcaggcaatgcacgtcctggctccaggtggacagagcatggggatggaggcagaacatcctcagacggcagtggcctcctgggccaggaagccgggggggtatatgggagccatgggcgcagggacacagaatggcgtgcagccacactcatccacatggttgtaggtgtgcaggacagtcgagccgtcgggacagcgcaagggcaccgtctcctcgtggacccgtctctcctggcagcaggtgcactggtgctgcatggcctgggcctctgccgagtacctggactctccggggcaggagccctcacagaaggtgatgttgacctcagtcttgcagccctggtgccacaggacggttgtgttgacgcggacctgacaggagtcctcctcacaggagtagcagcagccggttttcctgaggctccccctgcagctggacacttctgggcaggatgcaggctgtggggtcagcaaatagactccgctctcgacctcacagtggtacacggtgcagttgtccacacggctattgacccaggtttcgttcagctggactggcggaccatcgggcgtgaggcaggcagtctgcacgcactccccacagcactgcccggccgctctcttgtactcaaagccctgggggcaggtagtattgtggcaggcatcctcccaacattgcaccgttgggtcctgggtgtccccagagaggcaggtacacgtgtggcagggaagggcccctgggaagattgcaccaaccccatagaagatgcccttgtaggaacacagctgaggtccgcagcggaaggtgggacagcagtcgccctccttctgggtgctgatcaactcctgccctagcgggcacacgggtgggctctggtggcaggtgcttgtgttgcatacgcacaccgtctcggggcaacaggggttgttggcccggggcctggtcacggtcacgaaaccggggtggctgcatggtgaggagggaccctgggcctcacagggcaggggcttgcattgcaccgacattgaaccctcatcacacacgcaggactggcagttgctgatccactgctgcccaggagacttgggaagcccatcaggtcccacgcaggggcagtcctgcacgcaggtgcccgtgtgtgcgctgaagaggatctggtccccggggcagaagcagccctccgccagcccctccagttgtgggttctggttcctggagttgcaggaggcaggctgtatggggccgcacggcttgtacactttggtgggtgggcaggtgagatcgcacaggccgccggttgcacctcgccagtcactgcacactccccgggcacggcaaagagctgcgtaggcctccaggctctggcagggcacctcggggtggccctggcagccgtcgctgatgcaggcattgaagaatgggcccgggggcacaaggtcgtggcactgggcaaagacctggctcagcatcagatcacagagtggctgcggcgggcacgggctgggggtgggtgcactagacaccggggccgggggactggccgtggggggcgtgccggtcggggcccagcagccgtcctttctgctgtcagggaccaaccaagtcttagccatgtccttacagctggtggcagtggttccgtcgcgctggagacaatcgtccctctggttgttggtgcaggtgccgcactggccctcggtgttgttgtggaagaggctgtagggcagccgggcctggaagatgtggccatcgaaggtgacgctcacacccagggcagggatgtccacgcgcatggtggtggtccccgtcacagacacaagcacgccgttcttgctgaaaccgctgctcaccggaatttggtcaaacaggatcaagtcctcctccttcccatgcaccgtggtgacggtgaggacgatatccatggacttgtagtggagcctgagggcgcgggagcagctggcggcagcggcagaggccgcgcagtagtggttgtccaagtagaggctgagattcccgaggcgtgcgtggatctctctcatgaggacataggtgcagttgccctcaaaggtgtaagaggtgccgtcaaaggtggaatagtgggaactgccccacacactgcagatgcactcgcactcatagtggaagtcacagggctggctcgggtcggacactttgatgggcaggtgcttgttcacgcaggtgacattggccacgggctttgggtccagcagggcgacatggttgtcacccacgcacctggccaccgtgcagttctccagggtccaggtctcattcacctgccggggagggatggcattgtcacagccaggggcaggggagggcgagggcagcagggtggaggacgctggtggtggggaggtggggcaggtgccctggaagcggtcgaggtcacagtgctggttgcacacggcatagaattggcagccggctcggtctgtcctattgtagattacttccccaggtgagaagaactgtccaaatgccctgcagaagcagggagtagagaagtgggagctggggaagtgagtgggtctgagggtggtgaggactgaggaggacacagtggacatgctgaaggctggcaggctgctggggagcactgcaggggtgtgggtggtccccagggtggacgagctgggaaccgtggagccagtggctgtgggcctggtggccgtggtggtcagcactttgggggtgccagctgttcccacagtggaggaggggatggcagtagacctagtggccatggtcgtggttgctgtagtggtccgcactggaagggtgcctgcagtccctgggctggagaaaggggttgctgaggagctgggcgctgtgggtatggtggctgtggaaccagtggcctcagtcggggtggctagagtggtcggctctgtgaggatccaggtcgtccccagagtggaggagggggttgctttggagctggtggctgtgggtgtggtggctgtgatggtcaacactttgggagagtacgttgttcccggggtggaggtcagggtggctgtggagcccgaggccatagttgtgatggctgtagtggtcggctctgtgaggaaccaagttgacgccggagtggaggagggcgtggctgtggagctggtggccacacttatggtggcagtggtggttggttctgtgtggatcctggtcgttcccagagtagaggaaggtatggccgtggagcctgtggccactgttgtgatggctgtagtggttggctctgtgaggatcccggtcgtccccagagtggaggagggcgtggccgtggacctcatagccactgttgtaatggttgtagtggtcggctctgtgaggatcccggttgtccctggagtgaaggagggtgaggctgtggagcccgtggccactgttgtgatggctgtagtggtcggctctgtgaggatcctggttgtccccggagtggaaggcatggccgtggagcccgtggccactgtcgtaatggctgtagtggtcagctctgtgaggattgaggtcttccctgaagtggaggagggcgtggccgtggagcccgtggtcactgttgtgatggctgtagtggtcggcgctgtgaggatcgaggtcgtccctggagtggaggaggggatggccatggagccagtggccacagtgatggtggcagtggtggttggctctgtgaggaatccagtcgtccccggagtggaagctgtggctgtggagcccgtggttgtgatggctgtagtggtcagttttgtgaggactgaggtcttccctggagtggaggagggcacggccgtggacttcgtggccactgttgtgacggtagtagtggttggctctgtgaggatcccggtcgtcccctgagtggaggagggcgtggccgtggagcccgtggccactgttgtgatggctgtagtggttggctctgtgaggattgaggtcatccctggagtggaggaaggcacggccgtggacctcgtggccactgttgtgatggttgtagtggttggctctgtgaggatcccagtcgtccctggagtggaggtgggcgtggccgtggagcccgtggtcactgttgtgatggctgtagtggttggctctgtgaggatcccagtcgtccccggagtagaaggcgtggccgtggagcccgtggccactgttgtgatggctgtagtggttggctctgtgaggatcgaggtcatccctggagtggaggaggggatggccgtggagccagtggccacagttatggtggcagtggtggtcggccctgtgaggatcccagtcgtccctggagtggaggtgggcgtggccgtggagcccgtggccactgttgtgatggctgtagtggttggctctgtgaggattgaggtcatccctggagtggaggaaggcacggccgtggacctcgtgaccactgttgtgatggttgtagtggttggctctgtgaggatcccggtcgtccctggagtggaggtgggcgtggccgtggagcccgtggtcactgttgtgatggctgtagtggttggctctgtgaggatcccagtcgtccccggagtagaaggcgtggccatggagcccgtggccactgttgtgatggctgtagtggttggctctgtgaggatcgaggtcatccctggagtggaggaggggatggccgtggagccagtggccacagttatggtggcagtggtggtcggccctgtgaggatcccagtcgtccccggagtggaggtgggcgtggccgtggagcccgtggccactgttgtgatggctgtggtggttggctctgtgaggatcgaggtcatccctggagtggaggaggggatggctgtggagccagtggccacagttatggtggcagtggtggtcggctctgtgaggatcccagtcgtccccggagtggaggaatgcgtggccgtggaccttgtggccactgttgtgatggttgtagtggttggctctgtgaggatcccggtcgtccccggagtggaggaaggcgtggccgtggactttgtggccactgttgtgatggttgtagtggttggctctgtgaggatcccggtcgtccccggagtggaggagggcgtggctgtggagcccggggccactgttgtgatggctgtagtggtcggctctgtgaggatcctggttgtccccggagtggaaggcgtggctgtggagcccgtggccactgtcgtgatggctgtagtggtcagctctgtgaggactgaggtcttccctggagtggaggagggcgtggccgtggagcccgtggtcactgttgtgatggttgtagtggttggctctgtgaggatcgaggtcatccctggagtggaggaggggatggccgtggagccagtggccacagttatggtggcagtggtggtcggctctgtgaggatcccagtcgtccccggagtggaggagggcgtggctgtggagcccggggccactgttgtgatggctgtagtggttggctctgtgaggatcgaggtcatccctggagtggaggaggggatggccgtggagccagtggccacagttatggtggcagtggtggtcggctctgtgaggatcccggtcgtccccggagtggaggtgggcttggccttggagcccgtggccactgttgtgatggctgtagtggttggctctgtgaggatcgaggtcatccctggagtggaggaggggatggccgtggagccagtggccacagttatggtggcagtggtggttggctctgtgaggattccagtcgtccccggagtggaggagggcgcggctgtggagcccggggccactgttgtgatggctgtagtggttggctctgtgaggatcgaggttatccctggagtggaggaggggatggccgtggagcccgtggccactgttgtgatcgctgtagtggtcggctctgtgaggatcccggttgtccccagagtggaggaatgcgtggccgtggaccttgtggccactgttgtgatggttgtagtggttggctctgtgaggatcccggtcgtccccggagtggaggaaggcatggccatggacctcgtggccactgttgtgatggttgtagtggttggctctgtgaggatcccagtagtccccggagtggaggagggcatggctgtggagcccggggccactgttgtgatggctgtagtggtcggctctgtgaggatcctggttgtccccggagtggaaggcgtggccgtggagcccgtggccactgtcgtgatggctgtagtggtcagctctgtgaggattgaggtcttccctggagtggaggagggcgtggccgtggagcccgtggtcactgttgtgatggctgtagtggtcggcgctgtgaggattgaggtcatccctggagtggaggaggggatggccgtggagccagtggccacagttatggtggcagtggtggttggctctgtgaggaatccagtcgtccccggagtggaggagggcagggctgtggagcctgtggccactgttgtgatggttgtagtggtcggctctgtgaggatcccagtcgtccccggagtggaaggtgtggccgtggagcccgtggttgtgatggctgtagtggtcagctctgtgaggactgaggtcttccctggagtggaggagggcacggccgtggacttcgtggccactgtcgtgacggttgtagtggttggctctgtgaggatcccagtcgtccccggagtggaggagggcgtggccgtggagcccgtggtcactgttgtgatggctgtagtggttggctctgtgaggatcgaggtcatccctggagtggaggaggggatggccgtggagcccgtggccactgttgtgatggctgtagtggtcggctctgtgaggatcccggttgtccccggagtagaaggcgtggccgtggacctcgtggccactgttgtgatggttgtagtggttggctctgtgaggatcgaggtcatccctggagtggaggaggggatggccgtggagccagtggccacagttatggtggcagtggtggtcggctctgtgaggatcccggtcgtccccggagtggaggtgggcgtggccatggagcccgtggccactgttgtgatggctgtagtggttggctctgtgaggatcgaggtcatccctggagtggaggaggggatggccgtggagccagtggccacagttatggtggcagtggtggttggctctgtgaggatcccagtcgtccccggagtggaggagggcgtggctgtggagccaggggccactgttgtgatggctgtagtggttggctctgtgaggatcgaggtcatccctggagtggaggaggggatggccgtggagcccgtggccactgttgtgatggctgtagtgatcggctctgtgaggatcccggttgtccccggagtggaggaaggcgtggccgtggacctcgtggccactgttgtgatggttgtagtggttggctctgtgaggatcccggtcgtccccggagtggaggtgggcgtggccgtggagcctgtggccactgttgtgatggttgtagtggttggctctgtgaggatcgaggtcatccctggagtggaggaggggatggccgtggagccagtggccacagttatggtggcagtggtggttggctctgtgaggatcccagtggtccctggagtggaggagggcgtggctgtggagcccggggccactgttgtgatggctgtagtggtcggctctgtgaggatcccggttgtccccggagtggaggaatgcgtggccgtggaccttgtggccactgttgtgatggttgtagtggttggctctgtgaggatcccggtcgtccccagagtggaggtgggcgtggctgtggagcccggggccactgttgtgatggctgtagtggtcggctctgtgaggatcaaggtcgtccctggagtggaggagggcgtggctgtggagctggtggccacagttatggtggcagtggtggttggctctgtgacgatcctggccgtctccggagtggaggagggcgtggccgtggacctcgtggccactgttgtaatggctgtagtggtcggctctgtgaggatcgaggtcatccctggagtggaggagggcatggctgtggagctggtggtcacagttatggtggcagtgttggttggttctgtgaggctcccggtcgtcccctgagtggaggaaggcatggccgtggagcccgtggccactgttgtgacggctgtagtggtcggctctgtgagaatccaggttgatgctggagtggaagagggcgtggccttggagccagtggccacagttatggtggcagtggtggttggctctgtgaagatccaggtggttcctggggtggaggaggggttggccgtggagccagtggctgcagtcattgcggttgtggtgggaaaaacttcagtgattcgagtagtccctgtagtggaggagggaatggctgtggagcccgtgaccactgttgtgatggctgtagtggttggctctgtgaggatcgcggtggtccctggagtggaggaggggatggtcgtggagcccgtggccactgttgtgatggctgtagtggttggctctgtgagaatccaggttgaccccagagtggaggagggtgtggccttggagctggtggccggggtgctggggcagtggccgtagttgcagcagaacacacggatttcgtagttgaagcacatcttgaacttccccacctgctgacggttcctgcagaccaagccgaagtccaggctgcattccacgacctggcccaactcccgcagggggacaccaggctgggcctgggcgcggcactcgaggcccaggggctgctcacagacggcccctccagccgcgcggatgttggagtaggtctccaagtccccgccagagggccccgacatggggtagctgtagtccagccagtctgaccaggcacactggggctcacagcccgtggacaccactggggttgtgggggccgatgtggggctgctgggcagcagggtcgaggtgtgggtcttgctggttgtggccgtggtcctggaggtggccgtggtgaggcccggggtggtcttccctggagaaaggggtgactcagtggttctgctgtgagtgtgaggactggacagggctgaagtcgagtgtggggtggtaccggtggttcctactggggtgtgggaagtcaccgtggatggctctgtgatgtgggtggtgcccgaggtggccacagaagtccgggctgtgggtaccgtgcggggactctcggggagctgggatcgcccatgtgtggtggccgtggtggacagcactgggggtgtatgggtggtccctagggcagaggagggagccactgtggtgctggtggctgcaggtgtggtggccgtggtggtcagcgctggggagatgggagttgtccctggagtggaggcgggggtggtggtggagcctgtggccgtgattgtcgtgcccgtggtggccagtgctgggggtgtaccagtggtctgtgggctagaggagggtgttgccatagagccagtggccacagttatggtggtgttggtcagcactgtcggggtgtgggtggtccctgggatggaggagggggtcactgtgtagctgctggttgtgggtgtggtggttgtggtgataagtgctgtaagggtgcttgcagtccctgggctggaggagggggtggctgtggagcttgtggtgatggccatggtggtcagcactttagaggtgtgagctgttcctgaggtgaggagggtggccgtggagccagtggcctggattgtggtggccgtggtggttagcgctgtggaggtgtgggtggtccttggagtggaggaggcgtgggctgtggacagggtggccgttggtgcggtggtctgtgctgtgaggttccaagtggttctcagggaggaggatgggatggctgtaaagctggtagctgtgggtgtggtggctgtgcttgtcagcacaactggaagggtgggtgcagtccctggactggtggaggcagtggctttggagccagtggctgtgggtttcgtggccatggtggtcagcaattctgaggtggcagcagttgctggggtggaggagggggtgactgtggagctggtggccacattcgtggtcaatgttgtggttggctctgtgaagatccaggtggtcccaggagtggaggaggaggtggctgtggagccggtggtccctggggtggaggaggggttggccgtggagccagtggcttcagtcgttgcagttgtggtgggaaacactttggtgatttgagtagtccctgaggtggaggaagggatggcagtggagcccgtgaccactgttgtgatggctgtagtggttggctctgtgaggatcgcggtggtccctggagtggaggagggcatggctgtggagcccgtggccactgttgtgatggctgtagtggttggctctgtgaggatcccggttgtctccagagtggaggagggtgtggccttggagctggtggccagggtgctggggcagcggccgtagttgcagcagaacacacggatttcgtagttgaagcacatcttgaacttccccacctgctgacggttcctgcagaccaagccgaagtccaggctgcattccacgacctggcccaactcccgcagggggacaccaggctgggcctgggcgcggcactcgaggcccaggggctgctcacagacggcccctccagccgcgcggatgttggagtaggtctccaagtccccgccagagggccccgacatggggtagctgtagtccagccagtctgaccaggcacactggggctcacagcctgtggacaccaccggggtcgtgggggccgatgtggggctgctggacagcagggtcgaggcacgggtctcgctggttgtggccgtggccgtggtcctggaggtggccgtggtgaggcccggggtggtcttccctggagaaaggggtgactcagtggttctgctgtgagtgtgagggctggacagggctggagtcgagtgtggggtggtaccggtggttcctactggggtgtgggaagtcaccgtggatggctctgtgatgtgggtggcgcccgaggtggccatggaagtccaggctgtgggtaccatgcggggactctcagggagctgggatcgcccatgtgtggtggccatggtggacagcactgggggtgtatgggtggtccctagggcagaggagggagccactgtggtgctggtggctgcaggtgtggtggccgtggtggtcagcactggggagatgggagttgtccctggagcggaggagggggtggtggtggagcctgtggccgtgattgtcgtgcccgtggtggccagtgctgggggtgtaccagtggtctgtgggctagaggagggtgttaccatagagccagtggccacggttgtggtggtgttggtcagcactgtgggggtgtgggtggtccctgggatggaggagggggtcaccatggagccgctggttgtgggtgtggtgtttgtgccgatccgccctggaagtgtgggtgcagtccctgggctagaggagggagtggctgtgaagcccctggttgtggtagtcagcactttggtagtgtaagctgttcctgggctggaggagggggtggccatggagccagtggccccagttgtggtggccgtggtggtaagcactgtggaaatatgggcagtctctggagtggaggagggtctgcctgtggacatggtggctgtgggtgtggtggtctgtgctgtgagggtccaggtggtccccagagaggaagaggggatggctgtaaagcttgtagctgtgggtgtggtggctgtgcttgtcagtgctggaagggtgggtgcagtccctggactggaggagggaatggctttggagccggtgactgtgggtgttgtggtcatggtggtcagcacatttggggtggcagcagttgccggggtgtgggagggggtggctttggaggtggtggccatggttgtgatggttgtggtgctcagcacttttggggtgtgagctgttccttggctggaggaggcggtggccatggagctggtgggcgtggtcatggtggctttagtggttggctctgtgaagatcaaggtggtaccacccagggtggtaccggtggttcctgctggggggtgggaagtcaccgtggagctggcagccacagttgtggtggctgtggtggtcaaccctttggggctctgagcagtgcttgaggtggaggagggggtggctgtggagctggtggcctgggttgtgatggctgtggtggtcagcactttcacagtgtgagctgttcctggggtggaggagcgcctggctgtggtgcctgtgctcctgggtgtggcagccgtggaaccggtgctcatgggtacggtaactgtggatccggtgctcgtgggagtggtaactgtggatccggtgctcgtgggagtggtagccgtggatccggtgctcgtgggagtggtagccgtggatccggtgctcgtgggagtggtagccatggatccggtgctcgtgggagtggtagccgtggatccggtgctcatgggtacggtaactgtggatccggtgctcgtgggagtggtagccatggaaccggtgctcatgggtacggtaactgtggatccagtgctcgtgggagtggtagccgtggatctggtgctcatgggagtggtagccgtggatccagtgctcgtgggagtggtagccgtggatccggtgcttgtgggagtggtagccgtggatccggtgctcgtgggagtgctggcacagtggctgtcatcacagcacaacagccgcacatgaaagttgtggcagtaccacaggggcccagactggtcacggttcctacacaccagcccaatgctcacatcacactgcaccacctgccccagggcctccaggggttggttgggctccttctcagagcggcactcaatgtcccatggatgctcgcagaaggtatggccagcagagcggatgaccccaaaggtctcaaagtccccgccatcagggtcagagctggggtagtcctcatcaaaccagtctgtccaggtgcagcgaggcacacagcccgtgctgggagacggggggccagagggcagggtcgtcctgatggtgggcccagagctggaagtccgcagggttgtgtgcacacgggcggtcaccacgggggacgttgtgggggtgctggtcacaattggactggtgggcatggatggagcctgggaggtctgctgctccctggtagggaggaggctggcggtggaaggtaaaggggcagagggactggggagggacaccctctctgtggtcttggagaagctggggccagtttgagtggtggccagagttgaggatcctgttactgctggtgacttggtgctccaggttgcaatggctgtggaggcagtcactgtggggctggtggcccccatggaggtgagtctgggtgcctgtgtggaggaggtgggcgtgggggcggctgtgtgggggcagtggctgtagtcgtcacagcagagcacacgcacattgtagttgaagcacatgttgaacctgcctgtctggtcctcattcttgcagatcagccccgtctccaggctacaggtcagcacctgcccgatctggtcgatgctcacctcggggtagttctccgcccggcactctatgctctttggtgcccagcacatcttgcccccagcagccctgatgttttcaaaagtttccatgtccccgcctgcgacccctgaggttgggaagtccacgtcaaaccactctgtccactcacacttcggttgacagcgggtagtgctctggctagtggtggtctcagtcaagcggctcagtgtcgtctctgtcctgggggtgctggtctcggcctgagaggtgaacagttcgctcgagagtgtcggcgccaggctcgtggtcagcggctgtttggagctggagctggctgtgcctgtcaggtgagctctggaggttgccattgtcgttggggctggcgtgggtggctgtgagggatgccatgtgcccgaactccccgtggtccctggcaggactgagtgtgttggaaggttggatgtggccacccctgggacagtgggttctgtggagcctgcaggaaccgtggggcctcctgtggtggctgtaccaagggtgcccgtgtatctgggggatgtcagtccttttgagagggtggggactgctgtggtgctggtcacccccaggctactcgttgactgcagcgttgagaacaggacctgggtggtggtggtggccgtctccagcgatgtggccggtggtggggttgtggctcgtcccctgcagtggtcggcgctgcagcacaggacccggatcctgtagttgtagcacatcttgaatatgccctcctgctcccagttcctgcacaccaggccgaagcggacgtcacagtgcaccttctgccctacctgagccaggggccagttggggaagctctcggcctggcactctatgtccttaggctgctcacataagtgccctcctgcagccctgatcttatcgtaggactcaacgtcccctccaagttgttcagacttggggtagtcctcatcaaaccactctgtccactgacaccggggctggcaggtggtggtacctggggccagggaggtgaccgtcgtggggcctgagctggacccagtctgtgaggtgagggctgctgttgaccggatgcttgggatcacccacagggtggtcttttcggttgctgtggtctgggtaggggtaggcacagcaggctccgtgctggcactgagggagggctgggggctggtgcctggggccagggaggggccacagggcacgtattcacagcagagaacccgcagctcatagtcgtgacagagcggggggctctgctggctgttggcgcacatcagccccctcacgcggtcacagtccacctgctggcccagctctcccagtggcatgtcgggaagctgccctgcccggcactcgatgtcggctggcacagggcacacctggtaccctctctgcctcaggttttcaaatgtctcgaagtctccgcctcccagaccaggctctgggtggtgcccgttgtaccagctggaccagcggcagacctcgcggacacacacagtggagactgggagggccgggcttgtcgtggagtgggggacccagctagtggtgaaggtgaatggcgttgtggccggagttccaggacatgccacagccttcctgacgatggtgccgttgcttccacagatggcgatcaaacaggcaccaagcccatcggtggtgttgtagatgacgtcctggtagccgtaggtcctgtcctcataggtgcaggtgcaggcctcaaggctgtgagcgcactggatgccactgggcgtgcagttacagctctggcagttctccgctgtggggactcttgcgccaacgtcatagtagtttccatccctgtcgtagcagccacactgggccacgcacttcatctggtcctcattgaagaagggctggctgggtgggcacgtcgggtagcagccttccaggccaggcaggtccaccaggcagtgcccactggggttccggcaggtttttaggcagggtgccccgcagggctggtagtgccactcacagcccccgtgtgggttgtagaagtcacagaacaaagggcaggtgtccggagtccgccaggacacacacaggcccgcgtcgtggcaagcctgggcgtaggcagccacagccgtgcagaaacactcgcagtcaccacccgagtcacaggcacacgcgtcgttcacgcaggcctcgtagtacttggtggagtcaacctgggagcggcaggcggcgaaggtaggaccgtggaggatgctgcactgcttctgggcccaggacttgcggaaggggttggccgtgcaggggtccttcggcgccagggcgtctgggcaggacggggagagcttccaactgttcccaaactccagtgcgtcccccaccacagaccggctacgcgtggcaaagtcattgatggcatggtcgtcgaagttcccgcacaggccgcagaccctgcccttgtagtcctggtgcagtcggatgaacacactggtcttccggtcccaggacacggccatcccgcgggtctcgatgaccaggaagatccccatgtagcggatcttgtagggcgggtccccgcccggccccctcgccactgccttaaaggcaccctcctggaggatcagctcgtagctctccacgaagagcttgatggccttggagcaggtggtgccggtggtcccacaggggatgttctcggtgacgatgcggaaggtcccgtgggtggcgtcgtccccacagtagtcctgggccaggatgtactcgcaactgccttcaaagctgtaacgctcgccatcaaaggtgatgaagtggccatccccgtaggccacgcaggtgcccaggcagagccggtggctgcactcccacctccggtttctgcaggtgcaggtgttgcagtcgaccctgatggtgtctccaggcttgtaggtggcctcgttgtgcacgcaggggcagtcctcctcggcgatgcagcccccactcccatctgacaccagccccgggggacagacacagccggacacgcagtgtgtgctgaaacagcccacgtccagcgtgtggcagcttcggaggcactcggccccaggggtgcccgccaagctgttgctgcagttcaggtacaccatgggggccacacaccctgtgcttttctgcagagaggctcccaggcagctcagcttcccaccctcacacgaacacacagcgccttcgtcgtgcacgacctctccaggagccagcacggtgccgtgaacgtagcaggggcactcccgggcgggcacacaggcgcccgcgtcattgaggaaggtgcccgtggggcaggtgcagccgtccacaggcacaaaggaaacgctgcaggtgacgtcggcctcactcaggcctcggcaagtcggctggcaggcgtccaccacgtaggcatagctctgggacttggggcagttctgcatgtacttggtgcagacgccgtccctccagccgctgagctgcacgcccttggcggcacaggcgtgcacataggaggacagcgcggcgcacaggcagtcctcgctccgctcacagttgcaggtgtcaaacaggcagttcgagtggaagggcttggggttgatgacggagtggcagcgcgagaaggagccggtggggtcagtcaggcgtgagcaccagtgccgggcgtagttctcattctccacactgagggagcaggggtcctcaaagctgttcctggcactggtgcaggtggcctgggccttccaggtgttggcgaaggctgcgcctgtggcctccaccaccccactgagggctgcgaagtcgtcagcctggttctggttgaagttcccacacaggccgcacatctggccctggtgggcggggtccagcctgacaaacacctgcatgagcggcaccagctgcaccagcagctgcagcccgaggcctgtgtgcactacgatgaagaagctcgagggtgtgaacagggtgatgttggctgccgacaggggcagctgcgtgtagatggagttgaggaacacgctgccgtctgcctggacccggatggccgtgtccccgccgtccaggctgagcgtcacggccttcaggcagttctcgttgtccgtcagtccacacttccgcagttcggccagcacggtgaagctgccatcagcacatttcttggacagaacgtagctgcagtcgccatgcaggtcgtaaagtttctcgtcgtaggtggtgatgtgggccccgccctgcacggagcaggtgccagggcacggcaggtcctggcactgccacagccccccagagcaggtgcaggagctgcaggtggtgttgacggaggcgcccgggctgtaggtgcggccgccgtgggtgcaggggcactgcccgaggggcaggcagccagagtgcgtgacatcatccagcaccgtgcctggggggcagaagcagccgtccacgcagtggtcttcgcagagctgtgcgcgctgggggttggagcaggtgtccacgcaaggtgagccacactcccggtgctgcatgttgacggggcaggtccgggggcagagctcagggcgcctccagttctgcggctggccccccgcgtgggcgcactggcgtgagtattccacaaaggtggcgcacgggcaggtggggcagcggcacaggtcctgggcgcaggcagccaggtacggggcagtgtccaccagtgcatggcactccgcaaaggccggccccagcagggtgtggtggcaaatgccttcctcatctgtgcagttgctggctggcaagggcagcgggtccgggcactgctccgtgggcccatccaacttctgcaggttcccaaactggagcggggtcagtctggcattgtgggcatagaactcgttgaaggctgggaggccgttgaagtccccgcacaggccacaggtctggttggcgtatttggggtccagctccagcagggcactgtcctctccgttccacaggaaggtcaggaccagccggatgctgaccttgacgtagtccccactctgctccaccaggagcccagtgcggctgtaaggcagctcctcccgctgcccgttgacgaggacagagccattggacgcctctagcaccagcccctgggccttgatgacaacacgggtgaccacaggcctggagcccaccaggcctctgcgtagctggacgttgaagtcctcataggcggcgccgcagtgctcggagaacacgtagttgcagaggccggggaagcggaagacgtcaccgtcgaaggtcttgtagtggaagtcgccccaggtgctgcacacccgcccgttgtgtgccgggttcagggggctcaggctggggaagacagtgacgggtggaacaaagctcacacgccgggtgggcgaggccatcggggcaccgccatctgtggtgtgccctgcactgccccagctcggctccgcagggccctgggtctctgcctgctgcaccaggagcacggccgccagagccaacaccagcgtccggcacgtgctcagggcacccatcctggggactggcacaggtggggggcacggacgggcagggagggaactggg

SEQ ID NO: 405 - RNA, 2610 nt, Homo sapiens
  source 1..2610: mol_type = mRNA
atcagggagactccaacttaaggcaacagcatgggtgaataagggcttcctgtggactggcaatgagaggcaaaacctggtgcttgagcactggcccctaaggcaggccttacagatctcttacactcgtggtgggaagagtttagtgtgaaactggggtggaattgggtgtccacgtatgttcccttttgccttactatatgttctgtcagtttctttcaggaaaatcttcatcttacaacttgtagggctggtgttaacttacgacttcactaactgtgactttgagaagattaaagcagcctatctcagtactatttctaaagacctgattacatatatgagtgggaccaaaagtaccgagttcaacaacaccgtctcttgtagcaatcggccacattgccttactgaaatccagagcctaaccttcaatcccaccgccggctgcgcgtcgctcgccaaagaaatgttcgccatgaaaactaaggctgccttagctatctggtgcccaggctattcggaaactcagataaatgctactcaggcaatgaagaagaggagaaaaaggaaagtcacaaccaataaatgtctggaacaagtgtcacaattacaaggattgtggcgtcgcttcaatcgacctttactgaaacaacagtaaaccatctttattatggtcatatttcacagcaccaaaataaatcatctttattaagtagatgaaacattaactctaactgtgacaaagaagaccacaaatagttatcttttaattacagaagagtttcttaacttacttttgtaagtttttattgtgtaagtttataatgcaggggaagtactactcctcaaatgttgagggaagcttccataacattgatgactggcttcatggcagtaattctcggctgtagttgcataagcattgctcaagaggaaaatccaaaagtgcagcaggagaactcttttccctgaaaaaggaaaaatattgaactcaatgatagcacctaaacttacatttaaaagacagacattccttctacatgtaatgacacttcttgtgttaaactaaaaatttacaagagaagaaagtgaaagcaaatggggtttcacaaatagttgtaaatatagtgaagcaatttgaaataattttcaagcaaagtattgtgaaagtattctaagccaagttttaaatattatctaacagacaagagtggtatatacaagtagatcctgagaagtacctttgttacagctactataaatatacatataaattatagaatctactttaatttattttgtgaacacttttgaaaatgtacatgttcctttgtaattgacactatatatttcttaataaaataattctcaaatttgtttcttatgaatcatctctcaaatctagttagacaatttgcacacatacttttctaagggacattatcttccttcaggtttttacctccactcatccttagagcccactgactgctcccctttatacctgttggccctgcctataggagagaatatttggagataggcagcttcaggatgcattgcaatcatccttttcttaaattatgtcactagtcttttattttttcccctcttgaactttcctcacacctggaagaaacaaagtaggaaaaagtgaacaggggatgtcaaatcgattcttgaattcccgctgcaagctagagccgcaggcaccctctcactcaatttccactcagaaccctataaacaccagtgggaagggcaacccactgcacgtgggaatgcactgatttttcctaggagtagacatgttcctctaattactccctgagggttagttggggctaaaccatgacagaagtggggaagttcaatgtccttaaatccatcttacttgccaacaggtaagaggaagcttacattacatgtccagtccacatttaaagagcacttactgtggaacaagccttcagccaaacaatggggatagaaaagtaggtaagactcagcctttgtccagagaagctcagggtatagctgaataggcagtttcttttgtcctgaggaaaatcaggacatgcctgctttctaaaaatcttcctctgaagacctgacccaagctcttaaatgctattgtaagagaaatttctttgtctattaactccattttagtagggattcactgactagattttactgaactatgaaaataaatacacataatttttcacaaaattttgggcccaattcccctaaaagaattgaggattagggagaaaggagacaactcaaagtcatcccattaagtgcagtttctttgaatcttctgctttatctttaaaaatttgtataatttatatattttattctatgtgttccatagatatcttaatgtaaaattagtcatttaaattacactgtcaattaaaagtaatgggcaagagattgcatcatactaatttagtaagaacgttcccaaatgttgtaacaatgtggatcatacatctctggttttttaaatgtattgaggctttcttggtggactagtatagtatacggtcagttatgtcaatgtttcatggtcaataaaaaggaagttgcaaattgtga

SEQ ID NO: 406 - RNA, 2610 nt, Homo sapiens
  source 1..2610: mol_type = mRNA
tcacaatttgcaacttcctttttattgaccatgaaacattgacataactgaccgtatactatactagtccaccaagaaagcctcaatacatttaaaaaaccagagatgtatgatccacattgttacaacatttgggaacgttcttactaaattagtatgatgcaatctcttgcccattacttttaattgacagtgtaatttaaatgactaattttacattaagatatctatggaacacatagaataaaatatataaattatacaaatttttaaagataaagcagaagattcaaagaaactgcacttaatgggatgactttgagttgtctcctttctccctaatcctcaattcttttaggggaattgggcccaaaattttgtgaaaaattatgtgtatttattttcatagttcagtaaaatctagtcagtgaatccctactaaaatggagttaatagacaaagaaatttctcttacaatagcatttaagagcttgggtcaggtcttcagaggaagatttttagaaagcaggcatgtcctgattttcctcaggacaaaagaaactgcctattcagctataccctgagcttctctggacaaaggctgagtcttacctacttttctatccccattgtttggctgaaggcttgttccacagtaagtgctctttaaatgtggactggacatgtaatgtaagcttcctcttacctgttggcaagtaagatggatttaaggacattgaacttccccacttctgtcatggtttagccccaactaaccctcagggagtaattagaggaacatgtctactcctaggaaaaatcagtgcattcccacgtgcagtgggttgcccttcccactggtgtttatagggttctgagtggaaattgagtgagagggtgcctgcggctctagcttgcagcgggaattcaagaatcgatttgacatcccctgttcactttttcctactttgtttcttccaggtgtgaggaaagttcaagaggggaaaaaataaaagactagtgacataatttaagaaaaggatgattgcaatgcatcctgaagctgcctatctccaaatattctctcctataggcagggccaacaggtataaaggggagcagtcagtgggctctaaggatgagtggaggtaaaaacctgaaggaagataatgtcccttagaaaagtatgtgtgcaaattgtctaactagatttgagagatgattcataagaaacaaatttgagaattattttattaagaaatatatagtgtcaattacaaaggaacatgtacattttcaaaagtgttcacaaaataaattaaagtagattctataatttatatgtatatttatagtagctgtaacaaaggtacttctcaggatctacttgtatataccactcttgtctgttagataatatttaaaacttggcttagaatactttcacaatactttgcttgaaaattatttcaaattgcttcactatatttacaactatttgtgaaaccccatttgctttcactttcttctcttgtaaatttttagtttaacacaagaagtgtcattacatgtagaaggaatgtctgtcttttaaatgtaagtttaggtgctatcattgagttcaatatttttcctttttcagggaaaagagttctcctgctgcacttttggattttcctcttgagcaatgcttatgcaactacagccgagaattactgccatgaagccagtcatcaatgttatggaagcttccctcaacatttgaggagtagtacttcccctgcattataaacttacacaataaaaacttacaaaagtaagttaagaaactcttctgtaattaaaagataactatttgtggtcttctttgtcacagttagagttaatgtttcatctacttaataaagatgatttattttggtgctgtgaaatatgaccataataaagatggtttactgttgtttcagtaaaggtcgattgaagcgacgccacaatccttgtaattgtgacacttgttccagacatttattggttgtgactttcctttttctcctcttcttcattgcctgagtagcatttatctgagtttccgaatagcctgggcaccagatagctaaggcagccttagttttcatggcgaacatttctttggcgagcgacgcgcagccggcggtgggattgaaggttaggctctggatttcagtaaggcaatgtggccgattgctacaagagacggtgttgttgaactcggtacttttggtcccactcatatatgtaatcaggtctttagaaatagtactgagataggctgctttaatcttctcaaagtcacagttagtgaagtcgtaagttaacaccagccctacaagttgtaagatgaagattttcctgaaagaaactgacagaacatatagtaaggcaaaagggaacatacgtggacacccaattccaccccagtttcacactaaactcttcccaccacgagtgtaagagatctgtaaggcctgccttaggggccagtgctcaagcaccaggttttgcctctcattgccagtccacaggaagcccttattcacccatgctgttgccttaagttggagtctccctgat

SEQ ID NO: 407 - RNA, 1143 nt, Mus musculus
  source 1..1143: mol_type = mRNA
cacgttcaggcgacagcatggttcttctcaggagcctcttcatcctgcaagtactagtacggatggggctaacttacaacttttctaactgcaacttcacgtcaattacgaaaatatattgtaacataatttttcatgacctgactggagatttgaaaggggctaagttcgagcaaatcgaggactgtgagagcaagccagcttgtctcctgaaaatcgagtactatactctcaatcctatccctggctgcccttcactccccgacaaaacatttgcccggagaacaagagaagccctcaatgaccactgcccaggctaccctgaaactgagagaaatgacggtactcaggaaatggcacaagaagtccaaaacatctgcctgaatcaaacctcacaaattctaagattgtggtattccttcatgcaatctccagaataaaattagctttcagcttctgctatgaaaatctctatcttggttttagtggacagaatactaagggtgtgacacttagaggaccactggtgtttattctttaattacagaagggattcttaacttattttttggcatatcgcttttttcagtataggtgctttaaatgggaaatgagcaatagaccgttaatggaaatatctgtactgttaatgaccagcttctgagaagtctttctcacctcccctgcacacaccttactctagggcaaacctaactgtagtaggaagagaattgaaagtagaaaaaaaaaattaaaaccaatgacagcatctaaaccctgtttaaaaggcaaggatttttctacctgtaatgattcttctaacattcctatgctaagattttaccaaagaagaaaatgacagttcgggcagtcactgccatgatgaggtggtctgaaagaagattgtggaatctgggagaaactgctgagatcatattgcaaatccagctgtcaaagggttcagacccaggacagtacaattcgtgagcagatctcaagagccttgcacatctacgagatatatatttaaagttgtagataatgaatttctaatttattttgtgagcacttttggaaatatacatgctactttgtaatgaatacatttctgaataaagtaattctcaagtttgaaaaaaaaaa

SEQ ID NO: 408 - RNA, 1143 nt, Mus musculus
  source 1..1143: mol_type = mRNA
ttttttttttcaaacttgagaattactttattcagaaatgtattcattacaaagtagcatgtatatttccaaaagtgctcacaaaataaattagaaattcattatctacaactttaaatatatatctcgtagatgtgcaaggctcttgagatctgctcacgaattgtactgtcctgggtctgaaccctttgacagctggatttgcaatatgatctcagcagtttctcccagattccacaatcttctttcagaccacctcatcatggcagtgactgcccgaactgtcattttcttctttggtaaaatcttagcataggaatgttagaagaatcattacaggtagaaaaatccttgccttttaaacagggtttagatgctgtcattggttttaattttttttttctactttcaattctcttcctactacagttaggtttgccctagagtaaggtgtgtgcaggggaggtgagaaagacttctcagaagctggtcattaacagtacagatatttccattaacggtctattgctcatttcccatttaaagcacctatactgaaaaaagcgatatgccaaaaaataagttaagaatcccttctgtaattaaagaataaacaccagtggtcctctaagtgtcacacccttagtattctgtccactaaaaccaagatagagattttcatagcagaagctgaaagctaattttattctggagattgcatgaaggaataccacaatcttagaatttgtgaggtttgattcaggcagatgttttggacttcttgtgccatttcctgagtaccgtcatttctctcagtttcagggtagcctgggcagtggtcattgagggcttctcttgttctccgggcaaatgttttgtcggggagtgaagggcagccagggataggattgagagtatagtactcgattttcaggagacaagctggcttgctctcacagtcctcgatttgctcgaacttagcccctttcaaatctccagtcaggtcatgaaaaattatgttacaatatattttcgtaattgacgtgaagttgcagttagaaaagttgtaagttagccccatccgtactagtacttgcaggatgaagaggctcctgagaagaaccatgctgtcgcctgaacgtg

SEQ ID NO: 409 - RNA, 1374 nt, Rattus norvegicus
  source 1..1374: mol_type = mRNA
atgggtgccaagccaaaccttatcgggaaaaacaggttgctgtctgacattctggtccctatcagcaattactcctgcgccctgcagcaaaccagtctacccaaaagaagcaatgtaattgcagtaaccttaaagaccacgtgtttaccagtaaagagcatagtcctggggtccagaggctctctgtgcttggagggatggttccaggagaaacaaagtaggacccgtgtttcagggaacattttctcactgtgtgtctctccagttcttttcaggtacctctttatcctgcaagtggtacggctggcactaacttacaacttttctaactgtaacttcgagatgattttgagaatatatcatgcaacaatttttcgtgacctgcttaaagatttgaatgggatcttgttcgaccaaatcgaggactgtgacagcaggacagcttgtctcctgaaaatcgaccaccataccttcaatcctgtccctggctgcccgtcactccccgagaaagcgttcgctttgaaaacgaaagcggccctcattaactactgcccaggctactctgaaactgagagaaatggtactctggaaatgacacgagaaatcagaaacatctgcctgaatcaaacctcacaaattctaggattgtggctttcctgcattcaatcttgaagaaaaaattagcttttggattatattatgaaaatatatatcttgtttttagtagatataatactaagggtgtgacacttaaaagaacactaatgtttattctttaattatagaagggattcttaacttatttttggcatatcgttgtttagtgtaggcgctttaaatggaaaatgagcattacccctttaatggaaataaccgtgctgttaatgattggcttcggcttctgagcagtctttctcacctcacctgagacactttactctagggcaaacctaactgtagtaggaagaaaatcaaaagtagaaaaacagttgaaaccaatgacaggatctatactccatttaaaaggcaagaatttttgtacctgtaatgattcttctaacattcctacgctaagattttactaaagaagaaaataacagcagaggaaagtgttcaggcagtcactgccatgatgaagctgtcagaatctgagagctactgctgcaactgatcgtgtagtaaatccagctgtaaaggggatcttaacccaccacagtgggatgcacaggcagatccccaagggcattgtgcagctgtgagatatatatttaaagttgtatataatgattttctaatttattccgtgagcacctttgaaaatatacatgtcgctgtgtaacaaatacacttctgaataaagtaattctcaagttc

SEQ ID NO: 410 - RNA, 1374 nt, Rattus norvegicus
  source 1..1374: mol_type = mRNA
gaacttgagaattactttattcagaagtgtatttgttacacagcgacatgtatattttcaaaggtgctcacggaataaattagaaaatcattatatacaactttaaatatatatctcacagctgcacaatgcccttggggatctgcctgtgcatcccactgtggtgggttaagatcccctttacagctggatttactacacgatcagttgcagcagtagctctcagattctgacagcttcatcatggcagtgactgcctgaacactttcctctgctgttattttcttctttagtaaaatcttagcgtaggaatgttagaagaatcattacaggtacaaaaattcttgccttttaaatggagtatagatcctgtcattggtttcaactgtttttctacttttgattttcttcctactacagttaggtttgccctagagtaaagtgtctcaggtgaggtgagaaagactgctcagaagccgaagccaatcattaacagcacggttatttccattaaaggggtaatgctcattttccatttaaagcgcctacactaaacaacgatatgccaaaaataagttaagaatcccttctataattaaagaataaacattagtgttcttttaagtgtcacacccttagtattatatctactaaaaacaagatatatattttcataatataatccaaaagctaattttttcttcaagattgaatgcaggaaagccacaatcctagaatttgtgaggtttgattcaggcagatgtttctgatttctcgtgtcatttccagagtaccatttctctcagtttcagagtagcctgggcagtagttaatgagggccgctttcgttttcaaagcgaacgctttctcggggagtgacgggcagccagggacaggattgaaggtatggtggtcgattttcaggagacaagctgtcctgctgtcacagtcctcgatttggtcgaacaagatcccattcaaatctttaagcaggtcacgaaaaattgttgcatgatatattctcaaaatcatctcgaagttacagttagaaaagttgtaagttagtgccagccgtaccacttgcaggataaagaggtacctgaaaagaactggagagacacacagtgagaaaatgttccctgaaacacgggtcctactttgtttctcctggaaccatccctccaagcacagagagcctctggaccccaggactatgctctttactggtaaacacgtggtctttaaggttactgcaattacattgcttcttttgggtagactggtttgctgcagggcgcaggagtaattgctgatagggaccagaatgtcagacagcaacctgtttttcccgataaggtttggcttggcacccat

SEQ ID NO: 411 - RNA, 2595 nt, Macaca mulatta
  source 1..2595: mol_type = mRNA
agacttctttttcaatgaatgctgtggtgacttgagtacaacacatgaagaattccagaaaagagccacttttgaagtcagcggtgaatcagaggttttctgaccctctccagtgccttctatgaaaaagagttcaactctggcttcagtttgtcccttacgcttttccggaatccctcgacatttcctgctctttttcccgggcactgtatggcctgtgacatttgctgggactcacacacggagtccaacctccttgctccgagcgatgactcctaggaacttccctagtaccagagcgatgcaggctctgacacgcgagggcggggggcggggtgggggagggggtgggggatgaacggggaagcggaagggaaggagagagaaaggggacctgggtgtagagagggcccagggcagcatgagccaagctagggcggagcagggggttcgtctcagcaacgtgatcagtgtcagcctttccctcccttcaacgctccattggtgctgctggaactcggaagactgctagacagacatcctccagggcgctctccctgactgcccttttaagcactcttttctggatcaacaatagtttgctagcacaaatctgagcccgccatctcgttgcttctcctgtctctaaaacccgtgcccgcgctcaggccccaggtgacagacgttttccagtctacgctgcgcggggctaagcctctgggaggcagagctcacgaaagcgtgcgccgcctctgggaaagctgagctcaggacagcatcctctccttgcgctcaccgctaggcatccagcagagcggtctcctcaagtttaacactggctttaagagtgggactgtgaaggtggctgggcactggaatttgtggttttaaaagttcttgacacctactagaaagtgctagaggacccttcagcccctaaggtgcccctagtcaccaagagtaggcgcttttcctgaaattgatatgataatttgaaaagtaggatttttgagaacaaggcacatcagatctttccccatttatttcaacctcttatcgttcctgcccctaaggttctggtcacggttgcacatttaatgctttcacatggaagtgctgttgaagactgagactgcacccaccctccaaagcatcccataagtaagcacagtttcttactagccaaggagaagggaaagcattagttgaaggcggccacacgaaattctcaaagatgttcaggatgcatggcacagtatgcaaggactccaaatccttacagtggctgctggtttcagaaggtgtttctcccaaataatagaaaagattggtcactgaaatgccctgtgggagaaagacactggtatccatttcttaaaggacattaacacatatgaagagtttagggcaaagtaaaaaggaggaagtttctttcaggaaattcttcatctttcaacttgtagggctggtgctaacttacgacttcactaactgtgactttgagaagattgaagcagactatctccgtactatttctaaagacctgattacatatatgagtgggaccaaaagtaccgacttcaacaacaccgtctcctgtagcaatcggccacactgccttactgaaatccagagcctaaccttcaatcccaccccccgctgcgcgtcgctcgccaaggaaatgttcgccaggaaaactaaggctaccctcgctctctggtgcccaggctattcggaaactcagataaatgctactcaggcaatgaagaagaggagaaaaaggaaagtcacaaccaataaatgtctggaacaagtgtcacaattactaggattgtggcgtcgcttcattcgaactttactgaaaaaacagtaaatcatctttattatggtcatatttcacagcaccaaataaatcatctttattaagtagatgaaacattaactctaactgtgacacagaagatcacaaatagttatcttttaattacagaagagtttcttaacttatttttctaagtttttattgtttaatataaatttataatgcaggggaagtactactcttcaaatgttgagggaagcttccgtaacattgatgactggcttaattggcagtaattctcagctgtaattgcataagcattactcaagaggaaaatccaaaagtgtagcaggagaactcttttccttgaaaaaggaaaaatattgaactaaatgatagcacctaaacttacatttaaaaggcagacattccttctacatgtaatgacacttcttgtgttaaactaaaaatttacaagagaagaaagtgaaagcaaatggggtttcacaaatagctgtaaatatagtgaagcaatttgaaataattttcaagcaaaatattgtgaaagtattctaagctaagttttaaatattacctaacagacaagagtggtatataataagtagatcctgagaagtacctttgttacagctaccataaatatatagagagagaatgtactttaatttattttgtgaatgcttttgaaaatgtatatgttcctttgtaattgacactatatatttcttaataaaataattctcaaatttgtt

SEQ ID NO: 412 - RNA, 2595 nt, Macaca mulatta
  source 1..2595: mol_type = mRNA
aacaaatttgagaattattttattaagaaatatatagtgtcaattacaaaggaacatatacattttcaaaagcattcacaaaataaattaaagtacattctctctctatatatttatggtagctgtaacaaaggtacttctcaggatctacttattatataccactcttgtctgttaggtaatatttaaaacttagcttagaatactttcacaatattttgcttgaaaattatttcaaattgcttcactatatttacagctatttgtgaaaccccatttgctttcactttcttctcttgtaaatttttagtttaacacaagaagtgtcattacatgtagaaggaatgtctgccttttaaatgtaagtttaggtgctatcatttagttcaatatttttcctttttcaaggaaaagagttctcctgctacacttttggattttcctcttgagtaatgcttatgcaattacagctgagaattactgccaattaagccagtcatcaatgttacggaagcttccctcaacatttgaagagtagtacttcccctgcattataaatttatattaaacaataaaaacttagaaaaataagttaagaaactcttctgtaattaaaagataactatttgtgatcttctgtgtcacagttagagttaatgtttcatctacttaataaagatgatttatttggtgctgtgaaatatgaccataataaagatgatttactgttttttcagtaaagttcgaatgaagcgacgccacaatcctagtaattgtgacacttgttccagacatttattggttgtgactttcctttttctcctcttcttcattgcctgagtagcatttatctgagtttccgaatagcctgggcaccagagagcgagggtagccttagttttcctggcgaacatttccttggcgagcgacgcgcagcggggggtgggattgaaggttaggctctggatttcagtaaggcagtgtggccgattgctacaggagacggtgttgttgaagtcggtacttttggtcccactcatatatgtaatcaggtctttagaaatagtacggagatagtctgcttcaatcttctcaaagtcacagttagtgaagtcgtaagttagcaccagccctacaagttgaaagatgaagaatttcctgaaagaaacttcctcctttttactttgccctaaactcttcatatgtgttaatgtcctttaagaaatggataccagtgtctttctcccacagggcatttcagtgaccaatcttttctattatttgggagaaacaccttctgaaaccagcagccactgtaaggatttggagtccttgcatactgtgccatgcatcctgaacatctttgagaatttcgtgtggccgccttcaactaatgctttcccttctccttggctagtaagaaactgtgcttacttatgggatgctttggagggtgggtgcagtctcagtcttcaacagcacttccatgtgaaagcattaaatgtgcaaccgtgaccagaaccttaggggcaggaacgataagaggttgaaataaatggggaaagatctgatgtgccttgttctcaaaaatcctacttttcaaattatcatatcaatttcaggaaaagcgcctactcttggtgactaggggcaccttaggggctgaagggtcctctagcactttctagtaggtgtcaagaacttttaaaaccacaaattccagtgcccagccaccttcacagtcccactcttaaagccagtgttaaacttgaggagaccgctctgctggatgcctagcggtgagcgcaaggagaggatgctgtcctgagctcagctttcccagaggcggcgcacgctttcgtgagctctgcctcccagaggcttagccccgcgcagcgtagactggaaaacgtctgtcacctggggcctgagcgcgggcacgggttttagagacaggagaagcaacgagatggcgggctcagatttgtgctagcaaactattgttgatccagaaaagagtgcttaaaagggcagtcagggagagcgccctggaggatgtctgtctagcagtcttccgagttccagcagcaccaatggagcgttgaagggagggaaaggctgacactgatcacgttgctgagacgaaccccctgctccgccctagcttggctcatgctgccctgggccctctctacacccaggtcccctttctctctccttcccttccgcttccccgttcatcccccaccccctcccccaccccgccccccgccctcgcgtgtcagagcctgcatcgctctggtactagggaagttcctaggagtcatcgctcggagcaaggaggttggactccgtgtgtgagtcccagcaaatgtcacaggccatacagtgcccgggaaaaagagcaggaaatgtcgagggattccggaaaagcgtaagggacaaactgaagccagagttgaactctttttcatagaaggcactggagagggtcagaaaacctctgattcaccgctgacttcaaaagtggctcttttctggaattcttcatgtgttgtactcaagtcaccacagcattcattgaaaaagaagtct

SEQ ID NO: 413 - RNA, 2685 nt, Homo sapiens
  source 1..2685: mol_type = mRNA
acagagctgcagctcttcagggaagaaatcaaaacaagatcacaagaatactgaaaaatgaagcctaaaatgaagtattcaaccaacaaaatttccacagcaaagtggaagaacacagcaagcaaagccttgtgtttcaagctgggaaaatcccaacagaaggccaaagaagtttgccccatgtactttatgaagctccgctctggccttatgataaaaaaggaggcctgttactttaggagagaaaccaccaaaaggccttcactgaaaacaggtagaaagcacaaaagacatctggtactcgctgcctgtcaacagcagtctactgtggagtgctttgcctttggtatatcaggggtccagaaatatactagagcacttcatgattcaagtatcacaggaatttcacctattacagagtatcttgcttctctaagcacatacaatgatcaatccattacttttgctttggaggatgaaagttatgagatatatgttgaagacttgaaaaaagatgaaaagaaagataaggtgttactgagttactatgagtctcaacacccctcaaatgaatcaggtgacggtgttgatggtaagatgttaatggtaaccctgagtcctacaaaagacttctggttgcatgccaacaacaaggaacactctgtggagctccataagtgtgaaaaaccactgccagaccaggccttctttgtccttcataatatgcactccaactgtgtttcatttgaatgcaagactgatcctggagtgtttataggtgtaaaggataatcatcttgctctgattaaagtagactcttctgagaatttgtgtactgaaaatatcttgtttaagctctctgaaacttagttgatggaaacctgtgagtcttgggttgagtacccaaatgctaccactggagaaggaatgagagataaagaaagagacaggtgacatctaagggaaatgaagagtgcttagcatgtgtggaatgttttccatattatgtataaaaatattttttctaatcctccagttattcttttatttccctctgtataactgcatcttcaatacaagtatcagtatattaaatagggtattggtaaagaaacggtcaacattctaaagagatacagtctgacctttacttttctctagtttcagtccagaaagaacttcatatttagagctaaggccactgaggaaagagccatagcttaagtctctatgtagacagggatccattttaaagagctacttagagaaataattttccacagttccaaacgataggctcaaacactagagctgctagtaaaaagaagaccagatgcttcacagaattatcattttttcaactggaataaaacaccaggtttgtttgtagatgtcttaggcaacactcagagcagatctcccttactgtcaggggatatggaacttcaaaggcccacatggcaagccaggtaacataaatgtgtgaaaaagtaaagataactaaaaaatttagaaaaataaatccagtatttgtaaagtgaataacttcatttctaattgtttaatttttaaaattctgatttttatatattgagtttaagcaaggcattcttacacgaggaagtgaagtaaattttagttcagacataaaatttcacttattaggaatatgtaacatgctaaaacttttttttttttaaagagtactgagtcacaacatgttttagagcatccaagtaccatataatccaactatcatggtaaggccagaaatcttctaacctaccagagcctagatgagacaccgaattaacattaaaatttcagtaactgactgtccctcatgtccatggcctaccatcccttctgaccctggcttccagggacctatgtcttttaatactcactgtcacattgggcaaagttgcttctaatccttatttcccatgtgcacaagtctttttgtattccagcttcctgataacactgcttactgtggaatattcatttgacatctgtctcttttcatttcttttaactaccatgcccttgatatatcttttgcacctgctgaacttcatttctgtatcacctgacctctggatgccaaaacgtttattctgctttgtctgttgtagaattttagataaagctattaatggcaatatttttttgctaaacgtttttgttttttactgtcactagggcaataaaatttatactcaaccatataataacattttttaactactaaaggagtagtttttattttaaagtcttagcaatttctattacaacttttcttagacttaacacttatgataaatgactaacatagtaacagaatctttatgaaatatgaccttttctgaaaatacatacttttacatttctactttattgagacctattagatgtaagtgctagtagaatataagataaaagaggctgagaattaccatacaagggtattacaactgtaaaacaatttatctttgtttcattgttctgtcaataattgttaccaaagagataaaaataaaagcagaatgtatatcatcccatctgaaaaacactaattattgacatgtgcatctgtacaataaacttaaaatgattattaaataatcaaatatatctactacattgtttatattattgaataaagtatattttccaaatgta

SEQ ID NO: 414 - RNA, 2685 nt, Homo sapiens
  source 1..2685: mol_type = mRNA
tacatttggaaaatatactttattcaataatataaacaatgtagtagatatatttgattatttaataatcattttaagtttattgtacagatgcacatgtcaataattagtgtttttcagatgggatgatatacattctgcttttatttttatctctttggtaacaattattgacagaacaatgaaacaaagataaattgttttacagttgtaatacccttgtatggtaattctcagcctcttttatcttatattctactagcacttacatctaataggtctcaataaagtagaaatgtaaaagtatgtattttcagaaaaggtcatatttcataaagattctgttactatgttagtcatttatcataagtgttaagtctaagaaaagttgtaatagaaattgctaagactttaaaataaaaactactcctttagtagttaaaaaatgttattatatggttgagtataaattttattgccctagtgacagtaaaaaacaaaaacgtttagcaaaaaaatattgccattaatagctttatctaaaattctacaacagacaaagcagaataaacgttttggcatccagaggtcaggtgatacagaaatgaagttcagcaggtgcaaaagatatatcaagggcatggtagttaaaagaaatgaaaagagacagatgtcaaatgaatattccacagtaagcagtgttatcaggaagctggaatacaaaaagacttgtgcacatgggaaataaggattagaagcaactttgcccaatgtgacagtgagtattaaaagacataggtccctggaagccagggtcagaagggatggtaggccatggacatgagggacagtcagttactgaaattttaatgttaattcggtgtctcatctaggctctggtaggttagaagatttctggccttaccatgatagttggattatatggtacttggatgctctaaaacatgttgtgactcagtactctttaaaaaaaaaaaagttttagcatgttacatattcctaataagtgaaattttatgtctgaactaaaatttacttcacttcctcgtgtaagaatgccttgcttaaactcaatatataaaaatcagaattttaaaaattaaacaattagaaatgaagttattcactttacaaatactggatttatttttctaaattttttagttatctttactttttcacacatttatgttacctggcttgccatgtgggcctttgaagttccatatcccctgacagtaagggagatctgctctgagtgttgcctaagacatctacaaacaaacctggtgttttattccagttgaaaaaatgataattctgtgaagcatctggtcttctttttactagcagctctagtgtttgagcctatcgtttggaactgtggaaaattatttctctaagtagctctttaaaatggatccctgtctacatagagacttaagctatggctctttcctcagtggccttagctctaaatatgaagttctttctggactgaaactagagaaaagtaaaggtcagactgtatctctttagaatgttgaccgtttctttaccaataccctatttaatatactgatacttgtattgaagatgcagttatacagagggaaataaaagaataactggaggattagaaaaaatatttttatacataatatggaaaacattccacacatgctaagcactcttcatttcccttagatgtcacctgtctctttctttatctctcattccttctccagtggtagcatttgggtactcaacccaagactcacaggtttccatcaactaagtttcagagagcttaaacaagatattttcagtacacaaattctcagaagagtctactttaatcagagcaagatgattatcctttacacctataaacactccaggatcagtcttgcattcaaatgaaacacagttggagtgcatattatgaaggacaaagaaggcctggtctggcagtggtttttcacacttatggagctccacagagtgttccttgttgttggcatgcaaccagaagtcttttgtaggactcagggttaccattaacatcttaccatcaacaccgtcacctgattcatttgaggggtgttgagactcatagtaactcagtaacaccttatctttcttttcatcttttttcaagtcttcaacatatatctcataactttcatcctccaaagcaaaagtaatggattgatcattgtatgtgcttagagaagcaagatactctgtaataggtgaaattcctgtgatacttgaatcatgaagtgctctagtatatttctggacccctgatataccaaaggcaaagcactccacagtagactgctgttgacaggcagcgagtaccagatgtcttttgtgctttctacctgttttcagtgaaggccttttggtggtttctctcctaaagtaacaggcctccttttttatcataaggccagagcggagcttcataaagtacatggggcaaacttctttggccttctgttgggattttcccagcttgaaacacaaggctttgcttgctgtgttcttccactttgctgtggaaattttgttggttgaatacttcattttaggcttcatttttcagtattcttgtgatcttgttttgatttcttccctgaagagctgcagctctgt

SEQ ID NO: 415 - RNA, 2558 nt, Mus musculus
  source 1..2558: mol_type = mRNA
agctctccaccggggctcactgcaggaaagtacagcattcaagaccagctatttcctgtctgtattgagaaacctgaaaaatgagacctagaatgaagtattccaactccaagatttccccggcaaagttcagcagcaccgcaggcgaagccctggtcccgccttgcaaaataagaagatcccaacagaagaccaaagaattctgccatgtctactgcatgagactccgttctggcctcaccataagaaaggagactagttattttaggaaagaacccacgaaaagatattcactaaaatcgggtaccaagcatgaagagaacttctctgcctatccacgggattctaggaagagatccttgcttggcagtatccaagcatttgctgcgtctgttgacacattgagcatccaaggaacttcacttttaacacagtctcctgcctccctgagtacatacaatgaccaatctgttagttttgttttggagaatggatgttatgtgatcaatgttgacgactctggaaaagaccaagagcaagaccaggtgctactacgctactatgagtctccctgtcctgcaagtcaatcaggcgacggtgtggatgggaagaagctgatggtgaacatgagtcccatcaaagacacagacatctggctgcatgccaacgacaaggactactccgtggagcttcaaaggggtgacgtctcgcctccggaacaggccttcttcgtccttcacaaaaagtcctcggactttgtttcatttgaatgcaagaatcttcctggcacttacataggagtaaaagataaccagctggctctagtggaggagaaagatgagagctgcaacaatattatgtttaagctctcgaaaatctaatgcagtaaaacgcctgtgcgttctgggttgaatgacttaatgcttccaactgaagaaagggtaacagagagaaagaaagccattcttggcttacgatgttgtggaatgttattatgtagaaaacttcttttatttccttttcttcagctacatgttcaatagactcacagatatatgacttacggcgttggtaaagaaactgaaggagattcagccttgctctttccttttctctgccttgagtcctgtatgaaatcacactcacggacttcagaagagcaggcaccacagtgcatggtttgctttagagagggtccatttcaaaaaccttcataaaaacaatgcaaaacaagaaaacaaccgaacaaaaaaaccacctatttcctggttctaaacaaatgattgtaatactagagcagttagtgggaggaccagctagggggaggatcacctaggggaggaccagctagggggaggaccagctgctgcaaagactgactgtttctcacttataataaaatgccaaatgcctccgcagatgccccaggcaaccctcagatcagccctttctgtgaagagtggcgttacctgtgcttgtttccttcttaaacttccaatttttctcttttaacacatttaacatttaactttaagcaagccagcttacattaggaagtgaaagacattttagttcccacccgtgattgaaatcattgactatatctaacaagcttaaagtctcctgtaagaactgatcaggatatacactaggacatgccaatagaatgggatctcatggtgcagtctgaagccctccaactggagagacgctaacatcatccttctcgctgatttccaaggagctatgactttggatgcatgcatctgcttggatgagatgtctcggctgcttgctttccttatgcacacgttctgttcagcttcacagcagcaatgctcacggtggaatagcttagcttagcttctgccccttctttggttcttttgaccaccatatccgtaacggctctcctactccctcagctttctttctctttgctctgacgtctatatgccaacacacttattccactgtctttaccctgcactgcagaattttacatctacctactggttaccaggttgtcccctgaacaaccttcctttgtgttttactgttattaaagtagtaatatttgtattcaaccatgtagtaatattttaagccactaaaggaatagttttacttatttagacaacagcaatttctactacatttttataagcttaaaacttacatgttttaaaacttaaaacgataaagacaataacaacattgatggagtatgatatgacagttcagaaagggttagctcttatcttccagtcgaggaaacctattgtatacaatagctggaggaatgtatgatcaaagaggccgggaaccgccgtgtaggatcgtacggctgtaacaggtataattgtttcattaatttgtcacagtcttactgtagaggaatgtaaaggcggaatctgcgtcattcctctggaaaccacagtgttgactctgtgaatctgtacgatatctttaaagtagtaactacgtagtcaaatgtgttcttgacgttgttcataactttgaataaaccatttttcaaaaccacgtgtgaccacaaa

SEQ ID NO: 416 - RNA, 2558 nt, Mus musculus
  source 1..2558: mol_type = mRNA
tttgtggtcacacgtggttttgaaaaatggtttattcaaagttatgaacaacgtcaagaacacatttgactacgtagttactactttaaagatatcgtacagattcacagagtcaacactgtggtttccagaggaatgacgcagattccgcctttacattcctctacagtaagactgtgacaaattaatgaaacaattatacctgttacagccgtacgatcctacacggcggttcccggcctctttgatcatacattcctccagctattgtatacaataggtttcctcgactggaagataagagctaaccctttctgaactgtcatatcatactccatcaatgttgttattgtctttatcgttttaagttttaaaacatgtaagttttaagcttataaaaatgtagtagaaattgctgttgtctaaataagtaaaactattcctttagtggcttaaaatattactacatggttgaatacaaatattactactttaataacagtaaaacacaaaggaaggttgttcaggggacaacctggtaaccagtaggtagatgtaaaattctgcagtgcagggtaaagacagtggaataagtgtgttggcatatagacgtcagagcaaagagaaagaaagctgagggagtaggagagccgttacggatatggtggtcaaaagaaccaaagaaggggcagaagctaagctaagctattccaccgtgagcattgctgctgtgaagctgaacagaacgtgtgcataaggaaagcaagcagccgagacatctcatccaagcagatgcatgcatccaaagtcatagctccttggaaatcagcgagaaggatgatgttagcgtctctccagttggagggcttcagactgcaccatgagatcccattctattggcatgtcctagtgtatatcctgatcagttcttacaggagactttaagcttgttagatatagtcaatgatttcaatcacgggtgggaactaaaatgtctttcacttcctaatgtaagctggcttgcttaaagttaaatgttaaatgtgttaaaagagaaaaattggaagtttaagaaggaaacaagcacaggtaacgccactcttcacagaaagggctgatctgagggttgcctggggcatctgcggaggcatttggcattttattataagtgagaaacagtcagtctttgcagcagctggtcctccccctagctggtcctcccctaggtgatcctccccctagctggtcctcccactaactgctctagtattacaatcatttgtttagaaccaggaaataggtggtttttttgttcggttgttttcttgttttgcattgtttttatgaaggtttttgaaatggaccctctctaaagcaaaccatgcactgtggtgcctgctcttctgaagtccgtgagtgtgatttcatacaggactcaaggcagagaaaaggaaagagcaaggctgaatctccttcagtttctttaccaacgccgtaagtcatatatctgtgagtctattgaacatgtagctgaagaaaaggaaataaaagaagttttctacataataacattccacaacatcgtaagccaagaatggctttctttctctctgttaccctttcttcagttggaagcattaagtcattcaacccagaacgcacaggcgttttactgcattagattttcgagagcttaaacataatattgttgcagctctcatctttctcctccactagagccagctggttatcttttactcctatgtaagtgccaggaagattcttgcattcaaatgaaacaaagtccgaggactttttgtgaaggacgaagaaggcctgttccggaggcgagacgtcacccctttgaagctccacggagtagtccttgtcgttggcatgcagccagatgtctgtgtctttgatgggactcatgttcaccatcagcttcttcccatccacaccgtcgcctgattgacttgcaggacagggagactcatagtagcgtagtagcacctggtcttgctcttggtcttttccagagtcgtcaacattgatcacataacatccattctccaaaacaaaactaacagattggtcattgtatgtactcagggaggcaggagactgtgttaaaagtgaagttccttggatgctcaatgtgtcaacagacgcagcaaatgcttggatactgccaagcaaggatctcttcctagaatcccgtggataggcagagaagttctcttcatgcttggtacccgattttagtgaatatcttttcgtgggttctttcctaaaataactagtctcctttcttatggtgaggccagaacggagtctcatgcagtagacatggcagaattctttggtcttctgttgggatcttcttattttgcaaggcgggaccagggcttcgcctgcggtgctgctgaactttgccggggaaatcttggagttggaatacttcattctaggtctcatttttcaggtttctcaatacagacaggaaatagctggtcttgaatgctgtactttcctgcagtgagccccggtggagagct

SEQ ID NO: 417 - RNA, 2471 nt, Rattus norvegicus
  source 1..2471: mol_type = mRNA
cactgcaggaaagtacatcctttaagaccagctatctcccatcactattaagaaacctgaaaaatgagacctagaatgaagtattcgaactccaagatttccccggcaaagtgcgacagcacatcaggcagagccctggtcccgccttgcaaaatcacaagatcccaacagaagaccaaagatatctgccatgtctactgcatgaggctccgttctggcctcaccataagaaaggagacctgttattttggaaaagaacccgccaaaagatattcactaaaatcaggtagcaagcatgaagggaggctctctacctgtttaccagattctaggaagagatccctgcttggcagtatccaagcgtttgctgcatcagttgacacactgagtatccaaggaacttcactgctaacagaatcttgtgccctgagcacatacaacgaccaatctgttagttttgttttggagaatggatgttacgtgatcaatgttgaagattgtgggaaaaaccaagaaaaagataaggtgctactccgttactacgagtcttcctttcctgcacaatcaggagacggtgtggatgggaagaagctgatggtgaacatgagtcctatcaaagacacagacatctggctgaatgccaatgacaaggactactctgtggagctccaaaagggtgatgtctctccgccagatcaggccttctttgttcttcacaaaaagtcctctgacttcgtttcattcgaatgcaagaatcttcctggcacttacataggagtaaaagacaaccaactggctctggtagaagagaatgatgagagctgtaacaatatcatgtttaagctctctaagatgtaacgtaataaaaggtctgtgccttctgggttaaatggttcaatgcttccaactgaagaaaggccaacagagagaaagaaagccgttcttggtttaagatgatgtgaaatgttatatagaagattttctcttatttccttttgtagagctgcatgttcaacaaagacgtgattctatgacttagggcaattggtaaagaaacagattcagtcctgccctttccttttctctgctttgagtcctgcatgaaatcacactcacagacctgttcagaagagcacgcaccacagctcacgttttgctttcaaaaatcttcatcaaaagaaaacaacaaaacaaaactaaaaaaataaaaaccctacacaattttccctggttctaagccaaagattgtaatactagagcagttgggggggaggaccagctagagggaggaccagctagggggaggaccagctaaggggaggaccaactgccccagagactgttcagaataaaatgccaaatgcatcgctatatgccccaggcacccctcagatcagccctttctgtcaagaaccctagcactccagatgtctacatgtctagacagacaagtctgtgtttgtgaagtggagtgatattacctgcgcttgtttccttcttaaaattccatttttttttcaacacagcaacttaactttaagcaagccagcttacattaggaaacgaaacacattttagttcgcacctgtgactgaaatcattgacgatatttaacaaacttcaagtcttctgtaagaactaaccagggacatacactagggtatctcaatagcatgggatcccatggtgcagtcagaagtcctcttactagaaagacactaaattgacctcaacttttcaatagctggttattgcctatgtttgtggcatgctgtgtccttctcgctgacttccgaagagctgaggctttcgatgcacccatctacttggatgaaatgtctctgctgcctgtctgcttgctttccttccacacaagttctgttctgccccttctttggttcttttgaccaacatatccgtaacaggtctccttctcactaagcattgtttctgttttctctgatgtctatacgccatccgctgtatttagtctgcaatgcagaattttacatagacttactggttacaagcttgttccttaaactttgtgtatgtttaagtgttactaaagtagtactaaagaaaggtttgtattcaaccacgtagtaatatttcaagctactaaaggaatagttttacctatttagacaacagcaatttctactacattttttataagcttaaaactcactatgtatacaatagccggtggggtgtagaacaaaagaggccaggaaccaccgtatacaattagagcgggtataattgtttcattaatttgtcacagttttactgtaaaggaaagtagaggcagaatctttatactccccccgaaaaccacaatgctgactctatgaatctgcacgccatccttaaaatagtaattaagtagccaaatgtgttcttgacgttgttcacaactttgaataaactaagtttcaaagccaaaaaaaaaaaaaaaaaaaaaaaaa

SEQ ID NO: 418 - RNA, 2471 nt, Rattus norvegicus
  source 1..2471: mol_type = mRNA
tttttttttttttttttttttttttggctttgaaacttagtttattcaaagttgtgaacaacgtcaagaacacatttggctacttaattactattttaaggatggcgtgcagattcatagagtcagcattgtggttttcggggggagtataaagattctgcctctactttcctttacagtaaaactgtgacaaattaatgaaacaattatacccgctctaattgtatacggtggttcctggcctcttttgttctacaccccaccggctattgtatacatagtgagttttaagcttataaaaaatgtagtagaaattgctgttgtctaaataggtaaaactattcctttagtagcttgaaatattactacgtggttgaatacaaacctttctttagtactactttagtaacacttaaacatacacaaagtttaaggaacaagcttgtaaccagtaagtctatgtaaaattctgcattgcagactaaatacagcggatggcgtatagacatcagagaaaacagaaacaatgcttagtgagaaggagacctgttacggatatgttggtcaaaagaaccaaagaaggggcagaacagaacttgtgtggaaggaaagcaagcagacaggcagcagagacatttcatccaagtagatgggtgcatcgaaagcctcagctcttcggaagtcagcgagaaggacacagcatgccacaaacataggcaataaccagctattgaaaagttgaggtcaatttagtgtctttctagtaagaggacttctgactgcaccatgggatcccatgctattgagataccctagtgtatgtccctggttagttcttacagaagacttgaagtttgttaaatatcgtcaatgatttcagtcacaggtgcgaactaaaatgtgtttcgtttcctaatgtaagctggcttgcttaaagttaagttgctgtgttgaaaaaaaaatggaattttaagaaggaaacaagcgcaggtaatatcactccacttcacaaacacagacttgtctgtctagacatgtagacatctggagtgctagggttcttgacagaaagggctgatctgaggggtgcctggggcatatagcgatgcatttggcattttattctgaacagtctctggggcagttggtcctccccttagctggtcctccccctagctggtcctccctctagctggtcctcccccccaactgctctagtattacaatctttggcttagaaccagggaaaattgtgtagggtttttatttttttagttttgttttgttgttttcttttgatgaagatttttgaaagcaaaacgtgagctgtggtgcgtgctcttctgaacaggtctgtgagtgtgatttcatgcaggactcaaagcagagaaaaggaaagggcaggactgaatctgtttctttaccaattgccctaagtcatagaatcacgtctttgttgaacatgcagctctacaaaaggaaataagagaaaatcttctatataacatttcacatcatcttaaaccaagaacggctttctttctctctgttggcctttcttcagttggaagcattgaaccatttaacccagaaggcacagaccttttattacgttacatcttagagagcttaaacatgatattgttacagctctcatcattctcttctaccagagccagttggttgtcttttactcctatgtaagtgccaggaagattcttgcattcgaatgaaacgaagtcagaggactttttgtgaagaacaaagaaggcctgatctggcggagagacatcacccttttggagctccacagagtagtccttgtcattggcattcagccagatgtctgtgtctttgataggactcatgttcaccatcagcttcttcccatccacaccgtctcctgattgtgcaggaaaggaagactcgtagtaacggagtagcaccttatctttttcttggtttttcccacaatcttcaacattgatcacgtaacatccattctccaaaacaaaactaacagattggtcgttgtatgtgctcagggcacaagattctgttagcagtgaagttccttggatactcagtgtgtcaactgatgcagcaaacgcttggatactgccaagcagggatctcttcctagaatctggtaaacaggtagagagcctcccttcatgcttgctacctgattttagtgaatatcttttggcgggttcttttccaaaataacaggtctcctttcttatggtgaggccagaacggagcctcatgcagtagacatggcagatatctttggtcttctgttgggatcttgtgattttgcaaggcgggaccagggctctgcctgatgtgctgtcgcactttgccggggaaatcttggagttcgaatacttcattctaggtctcatttttcaggtttcttaatagtgatgggagatagctggtcttaaaggatgtactttcctgcagtg

SEQ ID NO: 419 - RNA, 2702 nt, Macaca mulatta
  source 1..2702: mol_type = mRNA
aataaaaagaatctagactcctctgaacacagagctgcagctcttcagggaagaaatcaaaacaagaccacaagaagcctgaaaaatgaagcctaaaatgaagtattcaaccaacaaaatttccacagcaaagcggaagaacacagcaagcaaagccttgtgtttcaagctgggaaaatcccaacagaaggccaaagaagtttgccacgtgtactttatgaagctccgctctggccttatgataaaaaaggaggcctgttactttaggagagaaaccaccaaaaggccttcactgaaaacaggtggaaaccacaaaggacatctggtactcgctgcctgtcaacagcagtctactgtggagtgctttgcctttggtatatcaggggtcccgaaatatactagagcacttcatgattcaagtatcacaggaatttcacctattacagaatctcttgcttctctaagcacatacaatgatcaatccattacttttgctttggaggatgaaagttatgagatatatgttgaagacttgaaaaaagataaaaagaaagataaggtgttactgagttactatgagtctcaacacccctcaaatgaatcaggtgatggtgttgatggtaagatgttaatggtaaccctgagtcctacaaaagacttctggttgcaagccaacaacaaggagcactctgtggagctccataagtgtgaaaaaccactgccagaccaggccttctttgtccttcataataggcccttcaactgtgtttcatttgaatgcaagactgatcctggagtgtttataggtgtaaaggataatcatcttgctctgattaaagtagactattctgagaatttgggtagtgagaatatcttgtttaagctctctgaaatttagttgatggaaacttgtgggtcttgggttgagtacccaaatgctaccactggagaaggaatgaaagataaagaaagagacagtgacatctaagggaaacgaagagtgcttagcatgctgtggaatgttttccttattatacataaaaatattttttctaatgcttcagttctttttttctttccctctgtataactgcatattcaatgcaagtatcagtatattaaatagggtattggtaaagaaactgtcaacattctaaagagatacaatctgactttcacttttctctagtttcagtccagaaagaacttcacatttagagctaaggccactgaggagagacagagccatagcttgtctctctgtagacagggatccattttaaagagctacttagagaaataattttcccccgttccaaacaataggctcaaacactagagctgctagtaaaaacaagaccagatgcttcacagagttatcattttttcaactggaataaaacaccagctttgtttgtagatgtcttaggcaacactcagagcagctgtcccttactgtcaggggatacggaacttcaaaggcccacatggcaagccaggtaacgtaaatgtgtgaaaaagtaaacataattgaaaaattaagacaaataaattcagtatttataaagtgaataacttcatttctaattgtttaatttttaaaattctgatttttatatattgaatttactttaagcaaggcattcttacattaggaagtgaattttagttcagacataaaatttcatttattgggaatatgtaacatgctaaaacttttttttttttaaagtactaagccacaacatgttttagagcatccaggtaccacataattacaatccatggtaaggccagaaatcctctaacctactacagcctagatgagacaccgaattaacattaacatttcagtaactgactgtccctcatgttcatggcctaccatcccttctgaccctggcttccacagacctatgtcttttgatatactcgcagtcacactgggtgaagttgcttttaatccttgcttcccatgtgctcaagtctttttgttgtccagcttcctgataaccctgcttactgtggaatattcatttgacatctgtctcttttcatttcttttaactaccatgtccttgatataccttttgcaccccctgaatttcatttctgtatcacctgacctctggatgccaacacatttattctgctttttctattgtagaattttagataaacctattaatggcaatattttttgctaaacatctttgttttttactgtcactagggcaataacatttatactcaaatatataacatttttttaactactaaaggaatagtttttaaagtcttagcaatttcttttgcaatttttcttagacttaatacttatgataaatgactaacatagtaacagaatatgaaatatgaccttttctgaaagtatgtacttttaaatttctactatattgaaacctattagatgtaagtgctggtagaatataagataaaagaggctgagaattactataccagggtattacaattgtaaaacaatatatctttgtttcattgttttgtcaataattgttaccaaggagataaaaataaaagcagaatgtgtatcatcccttctgaaaaacactaattattgatgtgtgcatctgtacgataaacttaaaatgattattaaataaccaaatatatctactacattgtttatattattgaataaaatatattttccaaaagta

SEQ ID NO: 420 - RNA, 2702 nt, Macaca mulatta
  source 1..2702: mol_type = mRNA
tacttttggaaaatatattttattcaataatataaacaatgtagtagatatatttggttatttaataatcattttaagtttatcgtacagatgcacacatcaataattagtgtttttcagaagggatgatacacattctgcttttatttttatctccttggtaacaattattgacaaaacaatgaaacaaagatatattgttttacaattgtaataccctggtatagtaattctcagcctcttttatcttatattctaccagcacttacatctaataggtttcaatatagtagaaatttaaaagtacatactttcagaaaaggtcatatttcatattctgttactatgttagtcatttatcataagtattaagtctaagaaaaattgcaaaagaaattgctaagactttaaaaactattcctttagtagttaaaaaaatgttatatatttgagtataaatgttattgccctagtgacagtaaaaaacaaagatgtttagcaaaaaatattgccattaataggtttatctaaaattctacaatagaaaaagcagaataaatgtgttggcatccagaggtcaggtgatacagaaatgaaattcagggggtgcaaaaggtatatcaaggacatggtagttaaaagaaatgaaaagagacagatgtcaaatgaatattccacagtaagcagggttatcaggaagctggacaacaaaaagacttgagcacatgggaagcaaggattaaaagcaacttcacccagtgtgactgcgagtatatcaaaagacataggtctgtggaagccagggtcagaagggatggtaggccatgaacatgagggacagtcagttactgaaatgttaatgttaattcggtgtctcatctaggctgtagtaggttagaggatttctggccttaccatggattgtaattatgtggtacctggatgctctaaaacatgttgtggcttagtactttaaaaaaaaaaaagttttagcatgttacatattcccaataaatgaaattttatgtctgaactaaaattcacttcctaatgtaagaatgccttgcttaaagtaaattcaatatataaaaatcagaattttaaaaattaaacaattagaaatgaagttattcactttataaatactgaatttatttgtcttaatttttcaattatgtttactttttcacacatttacgttacctggcttgccatgtgggcctttgaagttccgtatcccctgacagtaagggacagctgctctgagtgttgcctaagacatctacaaacaaagctggtgttttattccagttgaaaaaatgataactctgtgaagcatctggtcttgtttttactagcagctctagtgtttgagcctattgtttggaacgggggaaaattatttctctaagtagctctttaaaatggatccctgtctacagagagacaagctatggctctgtctctcctcagtggccttagctctaaatgtgaagttctttctggactgaaactagagaaaagtgaaagtcagattgtatctctttagaatgttgacagtttctttaccaataccctatttaatatactgatacttgcattgaatatgcagttatacagagggaaagaaaaaaagaactgaagcattagaaaaaatatttttatgtataataaggaaaacattccacagcatgctaagcactcttcgtttcccttagatgtcactgtctctttctttatctttcattccttctccagtggtagcatttgggtactcaacccaagacccacaagtttccatcaactaaatttcagagagcttaaacaagatattctcactacccaaattctcagaatagtctactttaatcagagcaagatgattatcctttacacctataaacactccaggatcagtcttgcattcaaatgaaacacagttgaagggcctattatgaaggacaaagaaggcctggtctggcagtggtttttcacacttatggagctccacagagtgctccttgttgttggcttgcaaccagaagtcttttgtaggactcagggttaccattaacatcttaccatcaacaccatcacctgattcatttgaggggtgttgagactcatagtaactcagtaacaccttatctttctttttatcttttttcaagtcttcaacatatatctcataactttcatcctccaaagcaaaagtaatggattgatcattgtatgtgcttagagaagcaagagattctgtaataggtgaaattcctgtgatacttgaatcatgaagtgctctagtatatttcgggacccctgatataccaaaggcaaagcactccacagtagactgctgttgacaggcagcgagtaccagatgtcctttgtggtttccacctgttttcagtgaaggccttttggtggtttctctcctaaagtaacaggcctccttttttatcataaggccagagcggagcttcataaagtacacgtggcaaacttctttggccttctgttgggattttcccagcttgaaacacaaggctttgcttgctgtgttcttccgctttgctgtggaaattttgttggttgaatacttcattttaggcttcatttttcaggcttcttgtggtcttgttttgatttcttccctgaagagctgcagctctgtgttcagaggagtctagattctttttatt

SEQ ID NO: 421 - RNA, 2697 nt, Homo sapiens
  source 1..2697: mol_type = mRNA
agaaggagcgaaacatctttgagcaagatgggtctctaccgcatccgcgtgtccactggggcctcgctctatgccggttccaacaaccaggtgcagctgtggctggtcggccagcacggggaggcggcgctcgggaagcgactgtggcccgcacggggcaaggagacagaactcaaggtggaagtaccggagtatctggggccgctgctgtttgtgaaactgcgcaaacggcacctccttaaggacgacgcctggttctgcaactggatctctgtgcagggccccggagccggggacgaggtcaggttcccttgttaccgctgggtggagggcaacggcgtcctgagcctgcctgaaggcaccggccgcactgtgggcgaggaccctcagggcctgttccagaaacaccgggaagaagagctggaagagagaaggaagttgtaccggtggggaaactggaaggacgggttaattctgaatatggctggggccaaactatatgacctccctgtggatgagcgatttctggaagacaagagagttgactttgaggtttcgctggccaaggggctggccgacctcgctatcaaagactctctaaatgttctgacttgctggaaggatctagatgacttcaaccggattttctggtgtggtcagagcaagctggctgagcgcgtgcgggactcctggaaggaagatgccttatttgggtaccagtttcttaatggcgccaaccccgtggtgctgaggcgctctgctcaccttcctgctcgcctagtgttccctccaggcatggaggaactgcaggcccagctggagaaggagctggagggaggcacactgttcgaagctgacttctccctgctggatgggatcaaggccaacgtcattctctgtagccagcagcacctggctgcccctctagtcatgctgaaattgcagcctgatgggaaactcttgcccatggtcatccagctccagctgccccgcacaggatccccaccacctccccttttcttgcctacggatcccccaatggcctggcttctggccaaatgctgggtgcgcagctctgacttccagctccatgagctgcagtctcatcttctgaggggacacttgatggctgaggtcattgttgtggccaccatgaggtgcctgccgtcgatacatcctatcttcaagcttataattccccacctgcgatacaccctggaaattaacgtccgggccaggactgggctggtctctgacatgggaattttcgaccagataatgagcactggtgggggaggccacgtgcagctgctcaagcaagctggagccttcctaacctacagctccttctgtccccctgatgacttggccgaccgggggctcctgggagtgaagtcttccttctatgcccaagatgcgctgcggctctgggaaatcatctatcggtatgtggaaggaatcgtgagtctccactataagacagacgtggctgtgaaagacgacccagagctgcagacctggtgtcgagagatcactgaaatcgggctgcaaggggcccaggaccgagggtttcctgtctctttacaggctcgggaccaggtttgccactttgtcaccatgtgtatcttcacctgcaccggccaacacgcctctgtgcacctgggccagctggactggtactcttgggtgcctaatgcaccctgcacgatgcggctgcccccgccaaccaccaaggatgcaacgctggagacagtgatggcgacactgcccaacttccaccaggcttctctccagatgtccatcacttggcagctgggcagacgccagcccgttatggtggctgtgggccagcatgaggaggagtatttttcgggccctgagcctaaggctgtgctgaagaagttcagggaggagctggctgccctggataaggaaattgagatccggaatgcaaagctggacatgccctacgagtacctgcggcccagcgtggtggaaaacagtgtggccatctaagcgtcgccaccctttggttatttcagcccccatcacccaagccacaagctgaccccttcgtggttatagccctgccctcccaagtcccaccctcttcccatgtcccaccctccctagaggggcaccttttcatggtctctgcacccagtgaacacattttactctagaggcatcacctgggaccttactcctctttccttccttcctcctttcctatcttccttcctctctctcttcctctttcttcattcagatctatatggcaaatagccacaattatataaatcatttcaagactagaatagggggatataatacatattactccacaccttttatgaatcaaatatgatttttttgttgttgttaagacagagtctcactttgacacccaggctggagtgcagtggtgccatcaccacggctcactgcagcctcagcgtcctgggctcaaatgatcctcccacctcagcctcctgagtagctgggactacaggctcatgccatcatgcccagctaatatttttttattttcgtggagacggggcctcactatgttgcctaggctggaaataggattttgaacccaaattgagtttaacaataataaaaagttgttttacgctaaagatggaaaagaactaggactgaactattttaaataaaatattggcaaaagaa

SEQ ID NO: 422 - RNA, 2697 nt, Homo sapiens
  source 1..2697: mol_type = mRNA
ttcttttgccaatattttatttaaaatagttcagtcctagttcttttccatctttagcgtaaaacaactttttattattgttaaactcaatttgggttcaaaatcctatttccagcctaggcaacatagtgaggccccgtctccacgaaaataaaaaaatattagctgggcatgatggcatgagcctgtagtcccagctactcaggaggctgaggtgggaggatcatttgagcccaggacgctgaggctgcagtgagccgtggtgatggcaccactgcactccagcctgggtgtcaaagtgagactctgtcttaacaacaacaaaaaaatcatatttgattcataaaaggtgtggagtaatatgtattatatccccctattctagtcttgaaatgatttatataattgtggctatttgccatatagatctgaatgaagaaagaggaagagagagaggaaggaagataggaaaggaggaaggaaggaaagaggagtaaggtcccaggtgatgcctctagagtaaaatgtgttcactgggtgcagagaccatgaaaaggtgcccctctagggagggtgggacatgggaagagggtgggacttgggagggcagggctataaccacgaaggggtcagcttgtggcttgggtgatgggggctgaaataaccaaagggtggcgacgcttagatggccacactgttttccaccacgctgggccgcaggtactcgtagggcatgtccagctttgcattccggatctcaatttccttatccagggcagccagctcctccctgaacttcttcagcacagccttaggctcagggcccgaaaaatactcctcctcatgctggcccacagccaccataacgggctggcgtctgcccagctgccaagtgatggacatctggagagaagcctggtggaagttgggcagtgtcgccatcactgtctccagcgttgcatccttggtggttggcgggggcagccgcatcgtgcagggtgcattaggcacccaagagtaccagtccagctggcccaggtgcacagaggcgtgttggccggtgcaggtgaagatacacatggtgacaaagtggcaaacctggtcccgagcctgtaaagagacaggaaaccctcggtcctgggccccttgcagcccgatttcagtgatctctcgacaccaggtctgcagctctgggtcgtctttcacagccacgtctgtcttatagtggagactcacgattccttccacataccgatagatgatttcccagagccgcagcgcatcttgggcatagaaggaagacttcactcccaggagcccccggtcggccaagtcatcagggggacagaaggagctgtaggttaggaaggctccagcttgcttgagcagctgcacgtggcctcccccaccagtgctcattatctggtcgaaaattcccatgtcagagaccagcccagtcctggcccggacgttaatttccagggtgtatcgcaggtggggaattataagcttgaagataggatgtatcgacggcaggcacctcatggtggccacaacaatgacctcagccatcaagtgtcccctcagaagatgagactgcagctcatggagctggaagtcagagctgcgcacccagcatttggccagaagccaggccattgggggatccgtaggcaagaaaaggggaggtggtggggatcctgtgcggggcagctggagctggatgaccatgggcaagagtttcccatcaggctgcaatttcagcatgactagaggggcagccaggtgctgctggctacagagaatgacgttggccttgatcccatccagcagggagaagtcagcttcgaacagtgtgcctccctccagctccttctccagctgggcctgcagttcctccatgcctggagggaacactaggcgagcaggaaggtgagcagagcgcctcagcaccacggggttggcgccattaagaaactggtacccaaataaggcatcttccttccaggagtcccgcacgcgctcagccagcttgctctgaccacaccagaaaatccggttgaagtcatctagatccttccagcaagtcagaacatttagagagtctttgatagcgaggtcggccagccccttggccagcgaaacctcaaagtcaactctcttgtcttccagaaatcgctcatccacagggaggtcatatagtttggccccagccatattcagaattaacccgtccttccagtttccccaccggtacaacttccttctctcttccagctcttcttcccggtgtttctggaacaggccctgagggtcctcgcccacagtgcggccggtgccttcaggcaggctcaggacgccgttgccctccacccagcggtaacaagggaacctgacctcgtccccggctccggggccctgcacagagatccagttgcagaaccaggcgtcgtccttaaggaggtgccgtttgcgcagtttcacaaacagcagcggccccagatactccggtacttccaccttgagttctgtctccttgccccgtgcgggccacagtcgcttcccgagcgccgcctccccgtgctggccgaccagccacagctgcacctggttgttggaaccggcatagagcgaggccccagtggacacgcggatgcggtagagacccatcttgctcaaagatgtttcgctccttct

SEQ ID NO: 423 - RNA, 2414 nt, Mus musculus
  source 1..2414: mol_type = mRNA
agaagggagaaaacttcatctgcaagatgggtgtctaccgcatccgcgtctccaccggggactccgtgtacgcgggctccaacaacgaggtctacctgtggttgatcggacagcatggggaggcatctctcgggaagctgttccgaccctgtcggaactcggaggcagaattcaaggtggatgtgtcagaataccttgggccactgctgtttgtgagagtgcagaaatggcattatctcaaagaggacgcctggttctgcaactggatttctgtgaagggccccggagaccagggatcggagtacacgttcccctgttaccgatgggttcagggcaccagcatcctgaacctccctgagggcactggctgcaccgtggttgaagactctcaaggcctgttcaggaaccacagggaggaggaactggaagaaaggaggagtctgtacaggtggggcaactggaaggatggcacaatcctgaacgtggcggcgaccagtatctctgacctccctgtagaccagcgatttcgagaggacaaaagacttgaatttgaagcttcacaggttctggggacaatggacaccgttattaacttccctaaaaacactgtgacctgctggaaaagcctagatgacttcaactatgttttcaagagtggccacaccaagatggctgagcgggttcgaaactcctggaaagaggatgctttctttgggtaccagtttctcaatggtgctaaccccatggtgctgaagcggtctacttgtctccctgcccgcctggtattccctccggggatggagaagctacaggcccagctggatgaggagctcaagaaaggcactctgtttgaagcggatttcttccttctggatgggatcaaggccaatgtcatcctttgtagtcagcagtacctggctgcccccctcgtcatgctgaagctgcagcccgatgggcaactcttgcctatagccatccagctcgaactgcccaaaactgggtctaccccaccgccgattttcacgcccttggatcccccaatggactggctcctggccaaatgctgggtccgaagctcagacttacagcttcatgagctacaggctcatcttctgaggggacacttggtggctgaggtctttgctgtggccaccatgaggtgcctgccttccgtgcaccctgtttttaagcttctagttcctcacctactctacaccatggaaatcaatgtccgggccaggagcgacctgatctcagagagaggcttttttgacaaggtgatgagcacaggtggaggaggccacctggatcttctcaagcaagctggagccttcctgacctacagctcattgtgtccccctgatgacttggctgagcgaggactcctggatattgacacttgcttctatgctaaagatgccctgcagctctggcaagtcatgaatcggtacgtggtgggaatgttcgatctctactacaagaccgaccaagctgttcaggatgactatgaactgcagagctggtgtcaagagatcactgagattgggttgcaaggtgcccaggacagaggcttccccacctccctccagtcccgggctcaggcttgccacttcatcaccatgtgcatcttcacatgcactgcgcagcactcttccatccatcttggccagctggattggttctactgggttcctaatgcaccctgcaccatgcggctgccaccacctaaaaccaaggacgcgacgatggagaagctgatggcgacgctgcccaatcctaatcagtctactctccagataaatgtcgtttggctcctgggcagacgccaggctgttatggtgcccctgggccagcattcagaggaacacttcccaaaccctgaggccaaagctgtgctgaagaagttcagagaggagctggctgccttggataaggaaattgagattcgtaacaagagcttggacataccttatgagtacctgcggcccagcctggtagaaaacagcgtggccatatgaccatcccccctctcgatttgttatttaatcaagaccactcaagtgcatccctgtgcttgagccccgccctctgccagtgtggaacccttttccaagagcccgctttccatagtctgctgtagtgaacacattttgctttggatgcgttacccagagtgccacttttcattcatcctttctgcttttccttccccatagggtaaataatagccatgcttgggaaaagcaccccgggaacacaaaagggtgataatatacattgttacacatcgtctatgaatcaaatagatctcaagccttaatagagtctaatagcaacaataaaagatgttttgggctagtgatagaaaagaacagggacctaattattttaaataaaatgttgcaaagattata

SEQ ID NO: 424 - RNA, 2414 nt, Mus musculus
  source 1..2414: mol_type = mRNA
tataatctttgcaacattttatttaaaataattaggtccctgttcttttctatcactagcccaaaacatcttttattgttgctattagactctattaaggcttgagatctatttgattcatagacgatgtgtaacaatgtatattatcacccttttgtgttcccggggtgcttttcccaagcatggctattatttaccctatggggaaggaaaagcagaaaggatgaatgaaaagtggcactctgggtaacgcatccaaagcaaaatgtgttcactacagcagactatggaaagcgggctcttggaaaagggttccacactggcagagggcggggctcaagcacagggatgcacttgagtggtcttgattaaataacaaatcgagaggggggatggtcatatggccacgctgttttctaccaggctgggccgcaggtactcataaggtatgtccaagctcttgttacgaatctcaatttccttatccaaggcagccagctcctctctgaacttcttcagcacagctttggcctcagggtttgggaagtgttcctctgaatgctggcccaggggcaccataacagcctggcgtctgcccaggagccaaacgacatttatctggagagtagactgattaggattgggcagcgtcgccatcagcttctccatcgtcgcgtccttggttttaggtggtggcagccgcatggtgcagggtgcattaggaacccagtagaaccaatccagctggccaagatggatggaagagtgctgcgcagtgcatgtgaagatgcacatggtgatgaagtggcaagcctgagcccgggactggagggaggtggggaagcctctgtcctgggcaccttgcaacccaatctcagtgatctcttgacaccagctctgcagttcatagtcatcctgaacagcttggtcggtcttgtagtagagatcgaacattcccaccacgtaccgattcatgacttgccagagctgcagggcatctttagcatagaagcaagtgtcaatatccaggagtcctcgctcagccaagtcatcagggggacacaatgagctgtaggtcaggaaggctccagcttgcttgagaagatccaggtggcctcctccacctgtgctcatcaccttgtcaaaaaagcctctctctgagatcaggtcgctcctggcccggacattgatttccatggtgtagagtaggtgaggaactagaagcttaaaaacagggtgcacggaaggcaggcacctcatggtggccacagcaaagacctcagccaccaagtgtcccctcagaagatgagcctgtagctcatgaagctgtaagtctgagcttcggacccagcatttggccaggagccagtccattgggggatccaagggcgtgaaaatcggcggtggggtagacccagttttgggcagttcgagctggatggctataggcaagagttgcccatcgggctgcagcttcagcatgacgaggggggcagccaggtactgctgactacaaaggatgacattggccttgatcccatccagaaggaagaaatccgcttcaaacagagtgcctttcttgagctcctcatccagctgggcctgtagcttctccatccccggagggaataccaggcgggcagggagacaagtagaccgcttcagcaccatggggttagcaccattgagaaactggtacccaaagaaagcatcctctttccaggagtttcgaacccgctcagccatcttggtgtggccactcttgaaaacatagttgaagtcatctaggcttttccagcaggtcacagtgtttttagggaagttaataacggtgtccattgtccccagaacctgtgaagcttcaaattcaagtcttttgtcctctcgaaatcgctggtctacagggaggtcagagatactggtcgccgccacgttcaggattgtgccatccttccagttgccccacctgtacagactcctcctttcttccagttcctcctccctgtggttcctgaacaggccttgagagtcttcaaccacggtgcagccagtgccctcagggaggttcaggatgctggtgccctgaacccatcggtaacaggggaacgtgtactccgatccctggtctccggggcccttcacagaaatccagttgcagaaccaggcgtcctctttgagataatgccatttctgcactctcacaaacagcagtggcccaaggtattctgacacatccaccttgaattctgcctccgagttccgacagggtcggaacagcttcccgagagatgcctccccatgctgtccgatcaaccacaggtagacctcgttgttggagcccgcgtacacggagtccccggtggagacgcggatgcggtagacacccatcttgcagatgaagttttctcccttct

SEQ ID NO: 425 - RNA, 2216 nt, Rattus norvegicus
  source 1..2216: mol_type = mRNA
tgcaagatgggtgtctaccgcatccgcgtctccaccggagactccaagtacgcgggctccaacaacgaggtctacctgtggttggttggacagcatggagaggcatctctcgggaagctgctacgaccctgtcgggactcggaagcagaattcaaagtggatgtgtcaggataccttgggccactgctgttcgtaagagtgcagaaatggcattatctcacggatgacgcctggttctgcaactggatttctgtgaagggccccggagaccaaggatcagagtacatgttcccctgttaccgatgggttcagggcagaagcatcctgagcctccctgagggcactggctgcaccgtggttgaagattctcaaggactgttcaggaaacatagggaagaggagcttgaagagaggaggagtctgtacaggtggggcaactggaaggatggctcaatcctgaatgtggcggcggccagtatatctgacctccctgtagaccaacgatttcgagaggacaaaagaattgaatttgaagcttcacaggttataggggtaatggatactgttgtcaactttcctataaacactgtgacctgctggaaaagcctagatgacttcaactgcgttttcaagagtggccataccaaaatggctgagcgggttcgaaactcctggaaggaagatgcgttctttgggtaccaattcctcaatggtgctaaccccatggtgctgaagcgctctacttgtcttcctgcccgcctggtattccctccaggaatggagaagctacaggcccagctgaacaaggagctccagaaaggcactctgtttgaagcggatttcttccttctggatgggatcaaggccaatgtcatcctttgtagccagcagtacctggctgcccctctcgtcatgctgaagctgatgcctgatggacaactcttgcccatagccatccagcttgaacttcccaaaactgggtctactccaccacctattttcacgccctcggatcccccaatggactggctcctagccaaatgctgggtccggagctccgacttacagctccatgagctgcaggctcatcttctgaggggacacttgatggctgaggtctttgctgtggccaccatgaggtgcctgccttccgtgcaccctgtttttaagcttctagttcctcatctgctttacaccatggaaattaatgtccgggccaggagtgacctgatctcagagagaggcttttttgacaaggcaatgagcacaggtgggggaggccacctggatcttctcaagcaagctggagcctttctgacctattgctcattgtgtccccccgatgacttggctgagcgaggactcttggatatcgagacttgcttctatgctaaagacgccctgcgactctggcagatcatgaatcggtacgtggtgggaatgttcaatctccactacaagaccgacaaagctgtgcaagacgactatgaactgcagagctggtgtcgagagatcactgacattggtcttcaaggggcccaggacagaggcttccctacctctcttcagtcccgggctcaggcttgctacttcatcaccatgtgcatcttcacgtgcaccgcacagcactcttccgtccatcttggccagctggattggttctactgggttcctaatgcaccctgcaccatgcggctgccaccacccaccaccaaggaagcaacaatggagaagctgatggctacactgcccaaccctaatcagtctactctccagataaatgtcgtttggctcctgggcagacgccaggctgttatggtgcccctgggccagcattcagaggaacactttccaaaccctgaggccaaggctgtgctgaagaagttcagagaggaactggctgccttggataaggaaattgagattcgtaataagagcttggacataccttatgagtacctgcggcccagcatggtggaaaacagcgtggccatatgagcatccccagactcctgctttgttgtttagttaagaccacccaagtacatccctgtgcttgagtggtggcagtcctgccctcccaagccccgccctctgaccctcaaagccccaccccctgcccatgtgggaccctcctccaagctgtccattgtctgctgcaatgaatacattttgctttggatgcattaaaaaaaaaaaaaaaaaaaaaaaaaaaa

SEQ ID NO: 426 - RNA, 2216 nt, Rattus norvegicus
  source 1..2216: mol_type = mRNA
ttttttttttttttttttttttttttttaatgcatccaaagcaaaatgtattcattgcagcagacaatggacagcttggaggagggtcccacatgggcagggggtggggctttgagggtcagagggcggggcttgggagggcaggactgccaccactcaagcacagggatgtacttgggtggtcttaactaaacaacaaagcaggagtctggggatgctcatatggccacgctgttttccaccatgctgggccgcaggtactcataaggtatgtccaagctcttattacgaatctcaatttccttatccaaggcagccagttcctctctgaacttcttcagcacagccttggcctcagggtttggaaagtgttcctctgaatgctggcccaggggcaccataacagcctggcgtctgcccaggagccaaacgacatttatctggagagtagactgattagggttgggcagtgtagccatcagcttctccattgttgcttccttggtggtgggtggtggcagccgcatggtgcagggtgcattaggaacccagtagaaccaatccagctggccaagatggacggaagagtgctgtgcggtgcacgtgaagatgcacatggtgatgaagtagcaagcctgagcccgggactgaagagaggtagggaagcctctgtcctgggccccttgaagaccaatgtcagtgatctctcgacaccagctctgcagttcatagtcgtcttgcacagctttgtcggtcttgtagtggagattgaacattcccaccacgtaccgattcatgatctgccagagtcgcagggcgtctttagcatagaagcaagtctcgatatccaagagtcctcgctcagccaagtcatcggggggacacaatgagcaataggtcagaaaggctccagcttgcttgagaagatccaggtggcctcccccacctgtgctcattgccttgtcaaaaaagcctctctctgagatcaggtcactcctggcccggacattaatttccatggtgtaaagcagatgaggaactagaagcttaaaaacagggtgcacggaaggcaggcacctcatggtggccacagcaaagacctcagccatcaagtgtcccctcagaagatgagcctgcagctcatggagctgtaagtcggagctccggacccagcatttggctaggagccagtccattgggggatccgagggcgtgaaaataggtggtggagtagacccagttttgggaagttcaagctggatggctatgggcaagagttgtccatcaggcatcagcttcagcatgacgagaggggcagccaggtactgctggctacaaaggatgacattggccttgatcccatccagaaggaagaaatccgcttcaaacagagtgcctttctggagctccttgttcagctgggcctgtagcttctccattcctggagggaataccaggcgggcaggaagacaagtagagcgcttcagcaccatggggttagcaccattgaggaattggtacccaaagaacgcatcttccttccaggagtttcgaacccgctcagccattttggtatggccactcttgaaaacgcagttgaagtcatctaggcttttccagcaggtcacagtgtttataggaaagttgacaacagtatccattacccctataacctgtgaagcttcaaattcaattcttttgtcctctcgaaatcgttggtctacagggaggtcagatatactggccgccgccacattcaggattgagccatccttccagttgccccacctgtacagactcctcctctcttcaagctcctcttccctatgtttcctgaacagtccttgagaatcttcaaccacggtgcagccagtgccctcagggaggctcaggatgcttctgccctgaacccatcggtaacaggggaacatgtactctgatccttggtctccggggcccttcacagaaatccagttgcagaaccaggcgtcatccgtgagataatgccatttctgcactcttacgaacagcagtggcccaaggtatcctgacacatccactttgaattctgcttccgagtcccgacagggtcgtagcagcttcccgagagatgcctctccatgctgtccaaccaaccacaggtagacctcgttgttggagcccgcgtacttggagtctccggtggagacgcggatgcggtagacacccatcttgca

SEQ ID NO: 427 - RNA, 2946 nt, Macaca mulatta
  source 1..2946: mol_type = mRNA
ctgctctcgccaggacaccgccttttggactggggctgaattctgccctttgaagctctgctccttggagctgggggccccagaggtaggcggagttgattggagacctgccacccacattccgaccccaagcgacctccaaaagggcggggtctcaggctgggttatttagctggtccacccttcttccccaccagaaggagcgaaacgtctttgagcaagatgggtctctaccgcatccgcttgtccacgggggcctcgctccatgcgggttccaagaaccaggtgcagctgtggctggtcggccagcacggggaggcggcgctcgggaagcgactgtggcccgcacggggcaaggagacagaagtcaaggtggaagtaccggagtacctggggccgctgctgtttgtgaagctgcgcaaacggcacctccttcaggacgacgcctggttctgcaactggatctccgtgcagggccccggagacggggacgaggtccggttcccttgttaccgctgggtggagggcgacggcgtcctgagcctgcccgaaggcaccggggcgagaagaggatctcacaaaaagtcactggccaagccctcccctgtccttctaggccgcactgtgggcgaagaccctcagggcctgttccagaaacaccgggaagaggagctggaagagagaaggaagctgtaccggtggggaaactggaaggatgggttaattctgaatgtggctgggacgaaactaagtgacctccctgtggatgagcgatttctggaagacaagagagttgactttgaggcttcactggccaaggggctggcggaccttgctatcaaagactctttaaatgttctgactcgctggaaggatctggatgacttcaaacggattttctggtgtggccagagcaagctggcagagcgcgtgcgggactcctggaaggaagatgccttatttgggtaccagtttcttaatggcgccaaccccatgttgctgaggcgctccgctcaccttcctgcccgcctcgtgttccctccaggcatggaggaactgcaggcccagctggagaaggagctggagggaggcacactgtttgaagctgacttctccctgctggatgggatcaaggccaacgtcattctctgtagccagcagtacctggctgcccctctggtcatgctgaaactgcagcctgatgggaaactcttgcccatggtcatccagctccaactacccagcgcaggatccccgccacctccacttttcttgcccacggatcctccaatggtctggcttctggccaaatgctgggtgcgcagctctgacttccagctccatgagctgcagtctcatcttctgaggggacacttgatggctgaggtcattgctgtggccaccatgaggtgcctgccgtccatacatcctatcttcaagcttatcattcctcacctgcgatacaccctggaaattaacgtccgggccaggactgggctggtctctgacatgggagtttttgaccaggtggtgagcactggtgggggaggccacgtggagctgctcaggcgagctggaggctttctaacctatagctccttctgtccccctgatgacttggctgaccgggggctcctaggagtgaagtcttccttctatgcccaggatgcactgcggctctgggaaatcatctctcggtatgtggaaggaatcgtgagtctccactataagacagacgtggctgtgaaagatgacccagagctgcagacctggtgtcgagagatcactgaaatcgggctgcaagggggccaggaccgagggtttcctgtctctttacagtctcgggatcaggtttgccactttgtcaccatgtgtatcttcacctgcaccggccaacactcctctgtgcacctgggccagctggactggtacacttgggtccctaacgcaccctgcacgatgcggctgcccccgccgaccaccaaggatgcaacgctggagacagtgatggcaacgctgcccaacttccaccaggcttctctgcagatgtccatcacttggcagctgggcagacgccagcccattatggtggctgtgggccagcatgaggaggagtatttttcgggccctgagcctaaggctgtgctgaagaagttcagggaggagctggctgccctggataaggaaatcgagaaccggaatgcaaagctggacatgccgtacgagtacctgcggcccagcctggtggaaaacagtgtggccatctgagcgtcgccagcctttggttacttcagcccccctcacccaagccacaagctgaccccttggtggctacagtcctgccctcccaagccccacactcttcccatgtcccaccctccctcaagggccaccttttcatggtctctgcacccagtgaacacattttactctagaggcatcacctggggccttactcctttttccttcctccctcctttcctatcttccttcttccctctcttcctcgttcttcattcagatctatagggtaaataggcacaattatataaaccatttcaaggctagaataaggggataatacgtattactccataccttttatgaatcaaatatgattttgttgttgttaagacagagtctcactttgacacccaagctggagtgcagtggcgccatcaccatggctcactgcagcctcagcctcctgggctcaaatgatcctccctcctcagcctcccgagtggctggaactacaggctcatgccatcatgcccagataatatttttttaattttttatagagatgggtcctcaccctatttcctaagctggaaataggattttgaacacaaattgagtttaacaataacaaaaagttattttacactaaagatggaaaagaactaggactaaagtattttaaataaaatattggcaaaagaa

SEQ ID NO: 428 - RNA, 2946 nt, Macaca mulatta
  source 1..2946: mol_type = mRNA
ttcttttgccaatattttatttaaaatactttagtcctagttcttttccatctttagtgtaaaataactttttgttattgttaaactcaatttgtgttcaaaatcctatttccagcttaggaaatagggtgaggacccatctctataaaaaattaaaaaaatattatctgggcatgatggcatgagcctgtagttccagccactcgggaggctgaggagggaggatcatttgagcccaggaggctgaggctgcagtgagccatggtgatggcgccactgcactccagcttgggtgtcaaagtgagactctgtcttaacaacaacaaaatcatatttgattcataaaaggtatggagtaatacgtattatccccttattctagccttgaaatggtttatataattgtgcctatttaccctatagatctgaatgaagaacgaggaagagagggaagaaggaagataggaaaggagggaggaaggaaaaaggagtaaggccccaggtgatgcctctagagtaaaatgtgttcactgggtgcagagaccatgaaaaggtggcccttgagggagggtgggacatgggaagagtgtggggcttgggagggcaggactgtagccaccaaggggtcagcttgtggcttgggtgaggggggctgaagtaaccaaaggctggcgacgctcagatggccacactgttttccaccaggctgggccgcaggtactcgtacggcatgtccagctttgcattccggttctcgatttccttatccagggcagccagctcctccctgaacttcttcagcacagccttaggctcagggcccgaaaaatactcctcctcatgctggcccacagccaccataatgggctggcgtctgcccagctgccaagtgatggacatctgcagagaagcctggtggaagttgggcagcgttgccatcactgtctccagcgttgcatccttggtggtcggcgggggcagccgcatcgtgcagggtgcgttagggacccaagtgtaccagtccagctggcccaggtgcacagaggagtgttggccggtgcaggtgaagatacacatggtgacaaagtggcaaacctgatcccgagactgtaaagagacaggaaaccctcggtcctggcccccttgcagcccgatttcagtgatctctcgacaccaggtctgcagctctgggtcatctttcacagccacgtctgtcttatagtggagactcacgattccttccacataccgagagatgatttcccagagccgcagtgcatcctgggcatagaaggaagacttcactcctaggagcccccggtcagccaagtcatcagggggacagaaggagctataggttagaaagcctccagctcgcctgagcagctccacgtggcctcccccaccagtgctcaccacctggtcaaaaactcccatgtcagagaccagcccagtcctggcccggacgttaatttccagggtgtatcgcaggtgaggaatgataagcttgaagataggatgtatggacggcaggcacctcatggtggccacagcaatgacctcagccatcaagtgtcccctcagaagatgagactgcagctcatggagctggaagtcagagctgcgcacccagcatttggccagaagccagaccattggaggatccgtgggcaagaaaagtggaggtggcggggatcctgcgctgggtagttggagctggatgaccatgggcaagagtttcccatcaggctgcagtttcagcatgaccagaggggcagccaggtactgctggctacagagaatgacgttggccttgatcccatccagcagggagaagtcagcttcaaacagtgtgcctccctccagctccttctccagctgggcctgcagttcctccatgcctggagggaacacgaggcgggcaggaaggtgagcggagcgcctcagcaacatggggttggcgccattaagaaactggtacccaaataaggcatcttccttccaggagtcccgcacgcgctctgccagcttgctctggccacaccagaaaatccgtttgaagtcatccagatccttccagcgagtcagaacatttaaagagtctttgatagcaaggtccgccagccccttggccagtgaagcctcaaagtcaactctcttgtcttccagaaatcgctcatccacagggaggtcacttagtttcgtcccagccacattcagaattaacccatccttccagtttccccaccggtacagcttccttctctcttccagctcctcttcccggtgtttctggaacaggccctgagggtcttcgcccacagtgcggcctagaaggacaggggagggcttggccagtgactttttgtgagatcctcttctcgccccggtgccttcgggcaggctcaggacgccgtcgccctccacccagcggtaacaagggaaccggacctcgtccccgtctccggggccctgcacggagatccagttgcagaaccaggcgtcgtcctgaaggaggtgccgtttgcgcagcttcacaaacagcagcggccccaggtactccggtacttccaccttgacttctgtctccttgccccgtgcgggccacagtcgcttcccgagcgccgcctccccgtgctggccgaccagccacagctgcacctggttcttggaacccgcatggagcgaggcccccgtggacaagcggatgcggtagagacccatcttgctcaaagacgtttcgctccttctggtggggaagaagggtggaccagctaaataacccagcctgagaccccgcccttttggaggtcgcttggggtcggaatgtgggtggcaggtctccaatcaactccgcctacctctggggcccccagctccaaggagcagagcttcaaagggcagaattcagccccagtccaaaaggcggtgtcctggcgagagcag

SEQ ID NO: 429 - RNA, 1420 nt, Homo sapiens
  source 1..1420: mol_type = mRNA
agacagagccaggaccctggaaggaagcaggatggctgccggaacagcagttggagcctgggtgctggtcctcagtctgtggggggcagtagtaggtgctcaaaacatcacagcccggattggcgagccactggtgctgaagtgtaagggggcccccaagaaaccaccccagcggctggaatggaaactgaacacaggccggacagaagcttggaaggtcctgtctccccagggaggaggcccctgggacagtgtggctcgtgtccttcccaacggctccctcttccttccggctgtcgggatccaggatgaggggattttccggtgccaggcaatgaacaggaatggaaaggagaccaagtccaactaccgagtccgtgtctaccagattcctgggaagccagaaattgtagattctgcctctgaactcacggctggtgttcccaataaggtggggacatgtgtgtcagagggaagctaccctgcagggactcttagctggcacttggatgggaagcccctggtgcctaatgagaagggagtatctgtgaaggaacagaccaggagacaccctgagacagggctcttcacactgcagtcggagctaatggtgaccccagcccggggaggagatccccgtcccaccttctcctgtagcttcagcccaggccttccccgacaccgggccttgcgcacagcccccatccagccccgtgtctgggagcctgtgcctctggaggaggtccaattggtggtggagccagaaggtggagcagtagctcctggtggaaccgtaaccctgacctgtgaagtccctgcccagccctctcctcaaatccactggatgaaggatggtgtgcccttgccccttccccccagccctgtgctgatcctccctgagatagggcctcaggaccagggaacctacagctgtgtggccacccattccagccacgggccccaggaaagccgtgctgtcagcatcagcatcatcgaaccaggcgaggaggggccaactgcaggctctgtgggaggatcagggctgggaactctagccctggccctggggatcctgggaggcctggggacagccgccctgctcattggggtcatcttgtggcaaaggcggcaacgccgaggagaggagaggaaggccccagaaaaccaggaggaagaggaggagcgtgcagaactgaatcagtcggaggaacctgaggcaggcgagagtagtactggagggccttgaggggcccacagacagatcccatccatcagctcccttttctttttcccttgaactgttctggcctcagaccaactctctcctgtataatctctctcctgtataaccccaccttgccaagctttcttctacaaccagagccccccacaatgatgattaaacacctgacacatcttg

SEQ ID NO: 430 - RNA, 1420 nt, Homo sapiens
  source 1..1420: mol_type = mRNA
caagatgtgtcaggtgtttaatcatcattgtggggggctctggttgtagaagaaagcttggcaaggtggggttatacaggagagagattatacaggagagagttggtctgaggccagaacagttcaagggaaaaagaaaagggagctgatggatgggatctgtctgtgggcccctcaaggccctccagtactactctcgcctgcctcaggttcctccgactgattcagttctgcacgctcctcctcttcctcctggttttctggggccttcctctcctctcctcggcgttgccgcctttgccacaagatgaccccaatgagcagggcggctgtccccaggcctcccaggatccccagggccagggctagagttcccagccctgatcctcccacagagcctgcagttggcccctcctcgcctggttcgatgatgctgatgctgacagcacggctttcctggggcccgtggctggaatgggtggccacacagctgtaggttccctggtcctgaggccctatctcagggaggatcagcacagggctggggggaaggggcaagggcacaccatccttcatccagtggatttgaggagagggctgggcagggacttcacaggtcagggttacggttccaccaggagctactgctccaccttctggctccaccaccaattggacctcctccagaggcacaggctcccagacacggggctggatgggggctgtgcgcaaggcccggtgtcggggaaggcctgggctgaagctacaggagaaggtgggacggggatctcctccccgggctggggtcaccattagctccgactgcagtgtgaagagccctgtctcagggtgtctcctggtctgttccttcacagatactcccttctcattaggcaccaggggcttcccatccaagtgccagctaagagtccctgcagggtagcttccctctgacacacatgtccccaccttattgggaacaccagccgtgagttcagaggcagaatctacaatttctggcttcccaggaatctggtagacacggactcggtagttggacttggtctcctttccattcctgttcattgcctggcaccggaaaatcccctcatcctggatcccgacagccggaaggaagagggagccgttgggaaggacacgagccacactgtcccaggggcctcctccctggggagacaggaccttccaagcttctgtccggcctgtgttcagtttccattccagccgctggggtggtttcttgggggcccccttacacttcagcaccagtggctcgccaatccgggctgtgatgttttgagcacctactactgccccccacagactgaggaccagcacccaggctccaactgctgttccggcagccatcctgcttccttccagggtcctggctctgtct

SEQ ID NO: 431 - RNA, 1387 nt, Mus musculus
  source 1..1387: mol_type = mRNA
gggaagaggggcagacagaacctggagcctgggaaggaagcaccatgccagcggggacagcagctagagcctgggtgctggttcttgctctatggggagctgtagctggtggtcagaacatcacagcccggattggagagccacttgtgctaagctgtaagggggcccctaagaagccgccccagcagctagaatggaaactgaacacaggaagaactgaagcttggaaggtcctctctccccagggaggcccctgggacagcgtggctcgaatcctccccaatggttccctcctccttccagccactggaattgtcgatgaggggactttccggtgtcgggcaactaacaggcgagggaaggaggtcaagtccaactaccgagtccgagtctaccagattcctgggaagccagaaattgtggatcctgcctctgaactcacagccagtgtccctaataaggtggggacatgtgtgtctgagggaagctaccctgcagggacccttagctggcacttagatgggaaacttctgattcccgatggcaaagaaacactcgtgaaggaagagaccaggagacaccctgagacgggactctttacactgcggtcagagctgacagtgatccccacccaaggaggaacccatcctaccttctcctgcagtttcagcctgggccttccccggcgcagacccctgaacacagcccccatccaactccgagtcagggagcctgggcctccagagggcattcagctgttggttgagcctgaaggtggaatagtcgctcctggtgggactgtgaccttgacctgtgccatctctgcccagccccctcctcaggtccactggataaaggatggtgcacccttgcccctggctcccagccctgtgctgctcctccctgaggtggggcacgaggatgagggcacctatagctgcgtggccacccaccctagccacggacctcaggaaagccctcctgtcagcatcagggtcacagaaaccggcgatgaggggccagctgaaggctctgtgggtgagtctgggctgggtacgctagccctggccttggggatcctgggaggcctgggagtagtagccctgctcgtcggggctatcctgtggcgaaaacgacaacccaggcgtgaggagaggaaggccccggaaagccaggaggatgaggaggaacgtgcagagctgaatcagtcagaggaagcggagatgccagagaatggtgccgggggaccgtaagagcacccagatcgagcctgtgtgatggccctagagcagctcccccacattccatcccaattcctccttgaggcacttccttctccaaccagagcccacatgatccatgctgagtaaacatttgacacggtgtg

SEQ ID NO: 432 - RNA, 1387 nt, Mus musculus
  source 1..1387: mol_type = mRNA
cacaccgtgtcaaatgtttactcagcatggatcatgtgggctctggttggagaaggaagtgcctcaaggaggaattgggatggaatgtgggggagctgctctagggccatcacacaggctcgatctgggtgctcttacggtcccccggcaccattctctggcatctccgcttcctctgactgattcagctctgcacgttcctcctcatcctcctggctttccggggccttcctctcctcacgcctgggttgtcgttttcgccacaggatagccccgacgagcagggctactactcccaggcctcccaggatccccaaggccagggctagcgtacccagcccagactcacccacagagccttcagctggcccctcatcgccggtttctgtgaccctgatgctgacaggagggctttcctgaggtccgtggctagggtgggtggccacgcagctataggtgccctcatcctcgtgccccacctcagggaggagcagcacagggctgggagccaggggcaagggtgcaccatcctttatccagtggacctgaggagggggctgggcagagatggcacaggtcaaggtcacagtcccaccaggagcgactattccaccttcaggctcaaccaacagctgaatgccctctggaggcccaggctccctgactcggagttggatgggggctgtgttcaggggtctgcgccggggaaggcccaggctgaaactgcaggagaaggtaggatgggttcctccttgggtggggatcactgtcagctctgaccgcagtgtaaagagtcccgtctcagggtgtctcctggtctcttccttcacgagtgtttctttgccatcgggaatcagaagtttcccatctaagtgccagctaagggtccctgcagggtagcttccctcagacacacatgtccccaccttattagggacactggctgtgagttcagaggcaggatccacaatttctggcttcccaggaatctggtagactcggactcggtagttggacttgacctccttccctcgcctgttagttgcccgacaccggaaagtcccctcatcgacaattccagtggctggaaggaggagggaaccattggggaggattcgagccacgctgtcccaggggcctccctggggagagaggaccttccaagcttcagttcttcctgtgttcagtttccattctagctgctggggcggcttcttaggggcccccttacagcttagcacaagtggctctccaatccgggctgtgatgttctgaccaccagctacagctccccatagagcaagaaccagcacccaggctctagctgctgtccccgctggcatggtgcttccttcccaggctccaggttctgtctgcccctcttccc

SEQ ID NO: 433 - RNA, 1443 nt, Rattus norvegicus
  source 1..1443: mol_type = mRNA
agccacagtaggaagtggggcagacagaaccaggagcctgggaaggaagcaccatgccaacggggacagtagctagagcctgggtactggttcttgctctgtggggagccgtagctggtggtcagaacatcacagcccggatcggagagccacttatgctgagctgtaagggggcccctaagaagccaacccagaagctagaatggaaactgaacacaggaaggactgaagcttggaaggtcctctctccccagggagacccctgggacagtgtggctcgaatcctccccaatggttcactcctccttccagctatcggaattgtcgatgaggggactttccggtgtcgggcaactaacaggcttgggaaggaggtcaagtccaactaccgagtccgagtctaccagattcctgggaagccggaaattgtgaatcctgcctctgaactcacagccaatgtccctaataaggtggggacgtgtgtgtctgaggggagctaccctgcagggacccttagctggcacttggatgggaaacctctgattcctgatggcaaagggacagttgtgaaggaggagaccaggaggcaccctgagacgggactcttcacgcttcggtcagagctcacagtgaccccagcccaaggagggaccactcctacctattcctgcagcttcagcctgggccttcctcggcacagacccctgaacacagcccccatccagccccgagtcagggagcccctgcctccagagggcattcagctgttggttgagcctgaaggtggaacagtcgctcctggtgggaccgtgaccctgacctgtgccatctctgcccagcctccccctcaaatccactggataaaagatggcacacccctgccccttgcccccagccctgtgctgctcctccctgaggtagggcatgaggatgagggcatctacagctgcgtggccacccaccctagccatggacctcaggaaagccctcctgtcaacatcagggtcacagaaaccggtgatgaaggacaagctgcaggctctgtggatgggtctgggctgggaacgctagccctggccttagggatcctgggaggcctgggaatagccgctctgctcattggggccatcctgtggcgaaaacgacaacccagactcgaggagaggaaggccccagaaagccaggaggacgaggaggaacgtgcagagctgaatcagtcagaggaagcggaaatgccagagaatggtgcagggggaccttaagagcgcccaggcaaaccctgtctccttcagcttccgacctcagctgtgctggctccagacgagctcccccactctacgatcccaattcaacctcgagccactttcttctccaaccagagcccacatgatccatgctgagtaaacacctgacacatgttaaaaaaaaaaaaaaaaaaaaaaa

SEQ ID NO: 434 - RNA, 1443 nt, Rattus norvegicus
  source 1..1443: mol_type = mRNA
tttttttttttttttttttttttaacatgtgtcaggtgtttactcagcatggatcatgtgggctctggttggagaagaaagtggctcgaggttgaattgggatcgtagagtgggggagctcgtctggagccagcacagctgaggtcggaagctgaaggagacagggtttgcctgggcgctcttaaggtccccctgcaccattctctggcatttccgcttcctctgactgattcagctctgcacgttcctcctcgtcctcctggctttctggggccttcctctcctcgagtctgggttgtcgttttcgccacaggatggccccaatgagcagagcggctattcccaggcctcccaggatccctaaggccagggctagcgttcccagcccagacccatccacagagcctgcagcttgtccttcatcaccggtttctgtgaccctgatgttgacaggagggctttcctgaggtccatggctagggtgggtggccacgcagctgtagatgccctcatcctcatgccctacctcagggaggagcagcacagggctgggggcaaggggcaggggtgtgccatcttttatccagtggatttgagggggaggctgggcagagatggcacaggtcagggtcacggtcccaccaggagcgactgttccaccttcaggctcaaccaacagctgaatgccctctggaggcaggggctccctgactcggggctggatgggggctgtgttcaggggtctgtgccgaggaaggcccaggctgaagctgcaggaataggtaggagtggtccctccttgggctggggtcactgtgagctctgaccgaagcgtgaagagtcccgtctcagggtgcctcctggtctcctccttcacaactgtccctttgccatcaggaatcagaggtttcccatccaagtgccagctaagggtccctgcagggtagctcccctcagacacacacgtccccaccttattagggacattggctgtgagttcagaggcaggattcacaatttccggcttcccaggaatctggtagactcggactcggtagttggacttgacctccttcccaagcctgttagttgcccgacaccggaaagtcccctcatcgacaattccgatagctggaaggaggagtgaaccattggggaggattcgagccacactgtcccaggggtctccctggggagagaggaccttccaagcttcagtccttcctgtgttcagtttccattctagcttctgggttggcttcttaggggcccccttacagctcagcataagtggctctccgatccgggctgtgatgttctgaccaccagctacggctccccacagagcaagaaccagtacccaggctctagctactgtccccgttggcatggtgcttccttcccaggctcctggttctgtctgccccacttcctactgtggct

SEQ ID NO: 435 - RNA, 1347 nt, Macaca mulatta
  source 1..1347: mol_type = mRNA
cctggaaggaagcaggatggcagccggagcagcagttggagcctgggtgctggtcctcagtctgtggggggcagtagtaggtgctcaaaacatcacagcccggatcggtgagccactggtgctgaagtgtaagggggcccccaagaaaccaccccagcagctggaatggaaactgaatacaggccggacagaagcttggaaggtcctatctccccagggaggcccctgggatagtgtggctcgtgtccttcccaacggctccctcttccttccggctgtcgggatccaggatgaggggattttccggtgccaggcaatgaacaggaatggaaaggagaccaagtccaactaccgagtccgtgtctaccagattcctgggaagccggaaattatagattctgcctctgaactcacggctggtgttcccaataaggtggggacatgtgtgtcagagggaagctaccctgcagggactcttagctggcacttggatgggaagcccctggtgcctaatgagaagggagtatctgtgaaggaagagaccaggagacaccctgagacggggctcttcacactgcagtcggagctaatggtgaccccagcccggggaggaaatccccatcccaccttctcctgtagcttcagcccaggccttccccgacgccgggccttgcacacagcccctatccagccccgtgtctgggagcctgtgcctctggaagaggtccaattggtggtagagccagaaggtggagcagtagctcctggtggaaccgtaaccctgacctgtgaagtccctgcccagccctctcctcaaatccactggatgaaggatggtgtgcccttacccctttcccccagccctgtgctgatcctccctgagatagggcctcaggaccagggaacctacaggtgtgtggccacccatcccagccacgggccccaggaaagccgtgctgtcagcatcagcatcatcgaaccaggcgaggaggggccaactgcaggctctgtgggaggatcagggccaggaactctagccctggccctggggatcctgggaggcctggggacagccgctctgctcattggggtcatcttgtggcaaaggcggcgacgccaaggagaggagaggaaggcctcagaaaaccaggaggaagaggaggagcgtgcagagctgaatcagtcggaggaacctgaggcaggcgagagtagtactggagggccttgaggggcccacagagagatcccatccaccagctcccttttctttttcccttaaactgttctggccccagaccaactctctcctgtataaccccaccttgccaaactttcttctacaaccag

SEQ ID NO: 436 - RNA, 1347 nt, Macaca mulatta
  source 1..1347: mol_type = mRNA
ctggttgtagaagaaagtttggcaaggtggggttatacaggagagagttggtctggggccagaacagtttaagggaaaaagaaaagggagctggtggatgggatctctctgtgggcccctcaaggccctccagtactactctcgcctgcctcaggttcctccgactgattcagctctgcacgctcctcctcttcctcctggttttctgaggccttcctctcctctccttggcgtcgccgcctttgccacaagatgaccccaatgagcagagcggctgtccccaggcctcccaggatccccagggccagggctagagttcctggccctgatcctcccacagagcctgcagttggcccctcctcgcctggttcgatgatgctgatgctgacagcacggctttcctggggcccgtggctgggatgggtggccacacacctgtaggttccctggtcctgaggccctatctcagggaggatcagcacagggctgggggaaaggggtaagggcacaccatccttcatccagtggatttgaggagagggctgggcagggacttcacaggtcagggttacggttccaccaggagctactgctccaccttctggctctaccaccaattggacctcttccagaggcacaggctcccagacacggggctggataggggctgtgtgcaaggcccggcgtcggggaaggcctgggctgaagctacaggagaaggtgggatggggatttcctccccgggctggggtcaccattagctccgactgcagtgtgaagagccccgtctcagggtgtctcctggtctcttccttcacagatactcccttctcattaggcaccaggggcttcccatccaagtgccagctaagagtccctgcagggtagcttccctctgacacacatgtccccaccttattgggaacaccagccgtgagttcagaggcagaatctataatttccggcttcccaggaatctggtagacacggactcggtagttggacttggtctcctttccattcctgttcattgcctggcaccggaaaatcccctcatcctggatcccgacagccggaaggaagagggagccgttgggaaggacacgagccacactatcccaggggcctccctggggagataggaccttccaagcttctgtccggcctgtattcagtttccattccagctgctggggtggtttcttgggggcccccttacacttcagcaccagtggctcaccgatccgggctgtgatgttttgagcacctactactgccccccacagactgaggaccagcacccaggctccaactgctgctccggctgccatcctgcttccttccagg

SEQ ID NO: 437 - RNA, 17448 nt, Homo sapiens
  source 1..17448: mol_type = mRNA
ctcagaggctgctgagggacagggcactcttccccgccgtccacacaatgagtgttggccggaggaagctggccctgctctgggccctggctctcgctctggcctgcacccggcatacaggccatgcccaggatggctcctccgaatccagctacaagcaccaccctgccctctctcctatcgcccgggggcccagcggggtcccgctccgtggggcgactgtcttcccatctctgaggaccatccctgtggtacgagcctccaacccggcgcacaacgggcgggtgtgcagcacctggggcagcttccactacaagaccttcgacggcgacgtcttccgcttccccggcctctgcaactacgtgttctccgagcactgcggtgccgcctacgaggattttaacatccagctacgccgcagccaggagtcagcggcccccacgctgagcagggtcctcatgaaggtggatggcgtggtcatccagctgaccaagggctccgtcctggtcaacggccacccggtcctgctgcccttcagccagtctggggtcctcattcagcagagcagcagctacaccaaggtggaggccaggctgggccttgtcctcatgtggaaccacgatgacagcctgctgctggagctggacaccaaatacgccaacaagacctgtgggctctgtggggacttcaacgggatgcccgtggtcagcgagctcctctcccacaacaccaagctgacacccatggaattcgggaacctgcagaagatggacgaccccacggaccagtgtcaggaccctgtccctgaacccccgaggaactgctccactggctttggcatctgtgaggagctcctgcacggccagctgttctctggctgcgtggccctggtggacgtcggcagctacctggaggcttgcaggcaagacctctgcttctgtgaagacaccgacctgctcagctgcgtctgccacacccttgccgagtactcccggcagtgcacccatgcaggggggttgccccaggactggcggggccctgacttctgcccccagaagtgccccaacaacatgcagtaccacgagtgccgctccccctgcgcagacacctgctccaaccaggagcactcccgggcctgtgaggaccactgtgtggccggctgcttctgccctgaggggacggtgcttgacgacatcggccagaccggctgtgtccctgtgtcaaagtgtgcctgcgtctacaacggggctgcctatgccccaggggccacctactccacagactgcaccaactgcacctgctccggaggccggtggagctgccaggaggttccatgcccgggtacctgctctgtgcttggaggtgcccacttctcaacgtttgacgggaagcaatacacggtgcacggcgactgcagctatgtgctgaccaagccctgtgacagcagtgccttcactgtactggctgagctgcgcaggtgcgggctgacggacagcgagacctgcctgaagagcgtgacactgagcctggatggggcgcagacggtggtggtgatcaaggccagtggggaagtgttcctgaaccagatctacacccagctgcccatctctgcagccaacgtcaccatcttcagaccctcaaccttcttcatcatcgcccagaccagcctgggcctgcagctgaacctgcagctggtgcccaccatgcagctgttcatgcagctggcgcccaagctccgtgggcagacctgcggtctctgtgggaacttcaacagcatccaggccgatgacttccggaccctcagtggggtggtggaggccaccgctgcggccttcttcaacaccttcaagacccaggccgcctgccccaacatcaggaacagcttcgaggacccctgctctctgagcgtggagaatgagaagtatgctcagcactggtgctcgcagctgaccgatgccgacggccccttcggccggtgccatgctgccgtgaagccgggaacctactactcgaactgcatgtttgacacctgcaactgtgagcggagcgaggactgcctgtgcgccgcgctgtcctcctacgtgcacgcctgtgccgccaagggcgtgcagctcggcggctggagggacggcgtctgcacgaagcctatgaccacttgccccaagtcaatgacgtaccactaccatgtcagcacctgccagcccacctgccgctccctgagcgagggggacatcacctgcagtgttggcttcatccccgtggatggctgcatctgtcccaagggcaccttcctggacgacacgggcaagtgtgtgcaggccagcaactgtccctgctaccacagaggctccatgatccccaatggggagtcggtgcacgacagcggggctatctgcacctgcacacatgggaagctgagctgcatcggaggccaagcccccgccccagtgtgtgctgcgcccatggtgttctttgactgccgaaatgccacgcccggggacacaggggctggctgtcagaagagctgccacacactggacatgacctgttacagcccccagtgtgtgcctggctgcgtgtgccccgacgggctggtggcggacggcgagggcggctgcatcactgcggaggactgcccctgcgtgcacaatgaggccagctaccgggccggccagaccatccgggtgggctgcaacacctgcacctgtgacagcaggatgtggcggtgcacagatgacccctgcctggccacctgcgccgtgtacggggacggccactacctcaccttcgacggacagagctacagcttcaacggagactgcgagtacacgctggtgcagaaccactgtggcgggaaagacagcacccaggactcctttcgtgttgtcaccgagaacgtcccctgcggcaccacagggaccacctgctccaaggccatcaagattttcctggggggcttcgagctgaagctaagccatgggaaggtggaggtgatcgggacggacgagagccaggaggtgccatacaccatccggcagatgggcatctacctggtggtggacaccgacattggcctggtgctgctgtgggacaagaagaccagcatcttcatcaacctcagccccgagttcaagggcagggtctgcggcctgtgtgggaacttcgacgacatcgccgttaatgactttgccacgcggagccggtctgtggtgggggacgtgctggagtttgggaacagctggaagctctccccctcctgcccagatgccctggcgcccaaggacccctgcacggccaaccccttccgcaagtcctgggcccagaagcagtgcagcatcctccacggccccaccttcgccgcctgccacgcacacgtggagccggccaggtactacgaggcctgcgtgaacgacgcgtgcgcctgcgactccgggggtgactgcgagtgcttctgcacggctgtggccgcctacgcccaggcctgccatgaagtaggcctgtgtgtgtcctggcggaccccgagcatctgccctctgttctgcgactactacaaccccgaaggccagtgcgagtggcactaccagccctgcggggtgccctgcctgcgcacctgccggaacccccgtggagactgcctgcgggacgtccggggcctggaaggctgctaccccaagtgcccaccagaggctcccatctttgatgaggacaagatgcagtgtgtggccacctgcccaaccccgcctctgccaccacggtgccacgtccatgggaagtcctaccggccaggtgcagtggtgccctcggacaagaactgccagtcctgcctttgtacggagcgcggcgtggagtgcacctacaaagctgaggcctgtgtctgcacctacaatggacagcgcttccacccaggggacgtcatctaccacacgacggatggcacgggtggctgcatctccgcccgctgcggggccaacggcaccattgagaggagggtctacccctgcagccccaccacccctgtccccccaaccaccttctccttctccacacccccgcttgtcgtgagctccacgcacacccccagcaatggcccaagcagcgcgcacacaggccctccgagcagcgcctggcccaccacagcaggcacttctcccaggacgaggctgcccacagcctctgcctcactgccgccggtctgtggggaaaagtgcctgtggtcgccatggatggatgtcagccgccctggacggggcacggacagcggtgacttcgacacactggagaacctccgcgcccatgggtaccgggtgtgcgaatcacccaggtcggtggagtgccgagctgaggacgcccccggagtgccgctccgagccctggggcagcgtgtgcagtgcagcccggatgtggggctgacctgtcgtaacagggagcaggcatcggggctctgctacaactaccagatcagggtccagtgctgcacgcccctaccctgctccacctctagcagtccagcccagaccactcctccaactacctccaagaccactgaaacccgggcctcaggctcctcagctcccagcagcacacctggcaccgtgtctctctctacagccaggacgacacctgccccaggtaccgctacctctgtcaaaaaaactttctcaactcccagccctccgccagtgccggcaacatcaacatcatccatgtcgaccacggccccggggacctctgtggtctccagcaagcccacccccacggagcccagcacatcctcctgcctgcaggagctttgcacctggaccgagtggatcgatggcagctaccctgctcctggaataaatggtggagattttgacacatttcaaaatttgagagacgaaggatacacattctgtgaaagtcctcgaagcgtgcagtgccgggcagagagcttccccaacacgccgctggcagacctggggcaggacgtcatctgcagccacacagaggggctgatttgcctgaacaagaaccagctcccacccatctgctacaactatgagatccgcatccagtgttgcgagacggtgaacgtgtgcagagacatcaccagactgccaaagaccgtcgcaacgacacggccgactccacatccaaccggagctcagacccagaccaccttcaccacacacatgccctcggcctccacagagcaacccacggcaacctccaggggtgggcccacagcaaccagcgtcacacagggcacccacaccacactagtcaccagaaactgtcatccccggtgcacctggacaaagtggttcgacgtggacttcccgtcccccggaccccatggtggagacaaggaaacctacaacaacatcatcaggagtggggaaaaaatctgccgccgacctgaggagatcaccaggctccagtgccgagccaagagccacccagaggtgagcatcgaacacctgggccaggtggtgcagtgcagccgggaagagggcctggtgtgccggaaccaggaccagcagggacccttcaagatgtgcctcaactacgaggtgcgtgtgctctgctgcgagacccccagaggctgccacatgacctccacacctggctccacctctagcagtccagcccagaccactccttcaacaacctccaagaccactgaaacccaggcctcaggctcctcagcccccagcagcacacctggcaccgtgtctctctctacagccaggacgacacctgccccaggtaccgctacctctgtcaaaaaaactttctcaactcccagccctccgccagtgccggcaacatcaacatcatccatgtcgaccacggccccggggacctctgtggtctccagcaagcccacccccacggagcccagcacatcctcctgcctgcaggagctttgcacctggaccgagtggattgatggcagctaccctgctcctggaataaatggtggagattttgacacatttcaaaatttgagagacgaaggatacacattctgtgaaagtcctcgaagcgtgcagtgccgggcagagagcttccccaacacgccgctggcagacctggggcaggacgtcatctgcagccacacagaggggctgatttgcctgaacaagaaccagctcccacccatctgctacaactatgagatccgcatccagtgttgcgagacggtgaacgtgtgcagagacatcaccagaccgccaaagaccgtcgcaacgacacggccgactccacatccaaccggagctcagacccagaccaccttcaccacacacatgccctcggcctccacagagcaacccacggcaacctccaggggtgggcccacagcaaccagcgtcacacagggcacccacaccacaccagtcaccagaaactgtcatccccggtgcacctggacaacgtggttcgacgtggacttcccgtcccccggaccccatggtggagacaaggaaacctacaacaacatcatcaggagtggggaaaaaatctgccgccgacctgaggagatcaccaggctccagtgccgagccaagagccacccagaggtgagcatcgaacacctgggccaggtggtgcagtgcagccgggaagagggcctggtgtgccggaaccaggaccagcagggacccttcaagatgtgcctcaactacgaggtgcgtgtgctctgctgcgagacccccaaaggctgccccgtgacctccacacctgtgacagctcctagcacccctagtgggagagccaccagcccaactcagagcacctcctcttggcagaaatccaggacaaccactttggtgacaaccagcacaacctccactccacagaccagtacaacctatgcccatacaaccagcacaacctctgctcctacagccagaacaacctctgctcctacaaccagaacaacctctgcctctccagccagcacaacctctggtcctggaaatactcccagccctgttcctaccaccagcacaatctctgctcctacaactagcataacctctgcccctacaaccagcacaacctctgcccctacaagcagcacaacctctggtcctggaactactcccagccctgttcctaccaccagcataacctctgcccctacaaccagcacaacctctgctcctacaaccagcacaacctctgcccgtacaagcagcacaacctctgccactaccaccagcagaatctctggtcctgaaactactcccagccctgttcctaccaccagcacaacctctgccactacaaccagcacaacctcagctcctacaaccagcacaacctctgcccctacaagcagcacaacctccagtccacagaccagcacaacctcggctcctacaaccagcacaacttctggtcctggaactaccccaagccctgttcccacgaccagcacaacctctgcccctacaacaagaacaacttctgctcctaaaagcagcacaacctctgccgctacaaccagcacaacctctggtcctgaaactactcctagacctgttcctaccaccagcacaacctcttctcctacaaccagcacaacctctgctcctacaaccagcacaacctctgcttctacaaccagcacaacctctggtgctggaactactcccagccctgttcccaccaccagcacaacctctgctcctacaaccagcacaacctctgcccctataagcagcacaacctctgccactacaaccagcacaacctctggtcctggaactactcccagccctgttcctaccacgagcacaacctctgctcctacaaccagcacaacctctggtcctggaactactcccagtgctgttcccaccaccagcataacctctgcacctacaaccagcacaaactctgcccctataagcagcacaacctctgccactacaaccagcagaatctctggtcctgaaactactcccagccctgttcctaccgccagcacaacctctgcttctacaactagcacaacctctggtcctggaactactcccagccctgttcctaccaccagcacaatctctgttcctaccaccagcacaacttctgcttctacaaccagcacaacctctgcttctacaaccagcacaacctctggtcctggaactactcccagccctgttcccaccaccagcacaacctctgctcccacaacaagcacaacctctgcccctacaaccagcacaatctcggccccaacaaccagcacaacctctgccactacaaccagcacgacctctgctcctacacccagaagaacctcagcccctacaaccagcacaatctctgcctctaccaccagcacaacctctgcgactacaaccagcacaacctctgctactacaaccagcacaatctctgcccctacaaccagcacaactttgtctcctacaaccagcacaacctctactactataaccagcacaacttctgcccctataagcagcacaacttccacaccacagaccagcacaacttcggctcctacaaccagcacaacttctggtcctggaactacttcaagccctgttcccaccaccagcacaacctctgcccctacaaccagcacaacctctgcccctacaaccagaacaacctctgtccctacaagcagcacaacctccactgctacaaccagcacaacctctggccctggaactactcccagccctgttcccaccaccagtacaacctctgctcctacaaccagaacaacctctgctcctacaaccagcacaacctctgcccctacaaccagcacaacctctgcccctacaagcagcacaacctcagctactacaaccagcacaatctctgttcctacaaccagcacaacttctgttcctggaactactcccagccctgttcctaccaccagcacaatctctgttcctaccaccagcacaacttctgcttctacaaccagcacaacctctggtcctggaactactcccagccctgttcccaccaccagcacaacctctgctcccacaacaagcacaacctctgcccctacaaccagcacaatctcggccccaacaaccagcacaccctctgcccctacaaccagcacaaccttagctcctacaaccagcacaacctctgcccctacaaccagcacaacctctacccctacaagcagcacaacctcctctccacagaccagcacaacctcggcttctaccaccagcataacttctggtcctggaactaccccaagccctgttcccaccaccagcacaacctctgctcctacaaccagcacaacctctgccgctacaaccagcacaatctcggccccaacaaccagcacaacgtctgctcctacaaccagcacaacctctgcctctacagccagcaaaacctctggtcttggaactactcccagccctattcctaccaccagcacaacctctcctcctacaaccagcacaacttctgcctctacagccagcaaaacctctggtcctggaaccactcccagccctgttcccaccaccagcacaatctttgctcctagaaccagcaccacttctgcctctacaaccagcacaacccctggtcctggaaccactcccagccccgttcccaccaccagcacagcctctgtttcaaagaccagcacaagccatgtttccatatccaagacaacccactcccaaccagtcaccagagactgtcatctccggtgcacctggaccaagtggtttgacatagacttcccatcccctggaccccacggcggggacaaggaaacctacaacaacatcatcaggagtggggaaaaaatctgccgccgacctgaggagatcaccaggctccagtgccgagccgagagccacccggaggtgagcattgaacacctgggccaggtggtgcagtgcagccgtgaagagggcctggtgtgccggaaccaggaccagcagggacccttcaagatgtgcctcaactacgaggtgcgtgtgctctgctgcgagacccctaaaggttgccccgtgacctccacacctgtgacagctcctagcacccctagtgggagagccaccagcccaactcagagcacttcctcttggcagaaatccaggacaaccactttggtgacaaccagcacaacctccactccacagaccagcacaacctctgctcctacaaccagcacaacctctgctcccacaaccagcacaacttctgcccctacaaccagcacaacctccactccacagaccagcatatcctctgcccctacaagcagcacaacctcggctcctacaagcagcacaatctctgctcgtacaaccagcataatctctgcccctacaaccagcacaacctcttcccctacaaccagcacaacctctgctactacaaccagcacaacctctgcccctacaagcagcacaacctccactccacagaccagcaaaacctcagctgctacaagcagcacaacctccggttctggaactactcccagccctgttaccaccaccagcacagcctctgtttcaaagaccagcacaagccatgtttctgtatccaagacaacccactcccaaccagtcaccagagactgtcatccccggtgcacctggaccaaatggtttgatgtggactttccatcccctggaccccacggtggggacaaggaaacctacaacaacatcatcaggagtggggaaaaaatctgccgccgacctgaggagatcaccaggctccagtgccgagccaagagccacccggaggtgagcatcgaacacctgggccaggtggtgcagtgcagccgcgaagagggcctggtgtgccggaaccaggaccagcagggacccttcaagatgtgcctcaactacgaggtgcgtgtgctttgctgcgagacccccaaaggctgccccgtgacctccacatctgtgacagctcctagcacccctagtgggagagccaccagcccaactcagagcacctcctcttggcagaaatccaggacaaccactttggtgacaagcagcataacctccactacacagaccagcacaacctctgcccctacaactagcacaacccctgcttctatacccagcacaacctctgccccaacaaccagcacaacctctgctcccacaacgagcacaacttctgcccctacaaccagcacaacctccactccacagaccaccacatcctctgcccctacaagcagcacaacctcggctcctaccaccagcacaatctctgcccctacaaccagcacaatctctgcccctacaaccagcacaacctctgctcccacagccagcacaacgtcagctcctacgagcacttcctcggctcctacaaccaacacaacctctgcccctacaactagcactacctctgctcccataaccagcacaatctctgcccctacaaccagcacaacctccactccacagaccagcacaatctcttcccctacaaccagcacaacctccactccgcagaccagcacaacctcttcccctacaactagcacaacctcagctcctacaaccagcacaacttctgcccctacaaccagcacaacctccactccacagaccagcatatcctctgcccctacaagcagcacaacctctgctcctacagccagcacaatctctgcccctacaaccagcacaacctctttccatacaaccagcacaacctctccccctacaagcagcacaagctccactccacagaccagcaaaacctcagctgctacaagcagcacaacctccggttctggaactactcccagccccgttcccaccaccagcacagcctctgtttcaaagaccagcacaagccatgtttctgtatccaagacaacccactcccaaccagtcaccagagactgtcatccccggtgcacctggaccaagtggtttgacgtggactttccatcccctggaccccacggtggggacaaggaaacctacaacaacatcatcaggagtggggaaaaaatctgccgccgacctgaggagatcaccaggctccagtgccgagccgagagccacccggaggtgagcatcgaacacctgggccaggtggtgcagtgcagccgggaagagggcctggtgtgccggaaccaggaccagcagggacccttcaagatgtgcctcaactacgaggtgcgtgtgctctgctgcgagacccccaaaggctgccccgtgacctccacacctgtgacagctcctagcacccctagtgggagagccaccagcccaactcagagcacttcctcttggcagaaatccaggacaaccactttggtgacaaccagcacaacctccactccacagaccagcacaacctctgcccctacaaccagcacaatccctgcttctacacccagcacaacctctgcccctacaaccagcacaacctctgcccctacaaccagcacgacctcagctcctacacacagaacgacttctggtcctacaaccagcacaaccttggctcctacaaccagcacaacctctgctccaacaaccagcacaaactctgctcctacaaccagcacaatctctgcctctacaaccagcacaatctctgcccctacaaccagcacaatctcttcccctacaagcagcacaacctccactccacagaccagcaaaacctcagctgctacaagcagcacaacctccggttctggaactactccaagccctgttcccaccaccagcacaacctctgcctctacaaccagcacaacttctgctcctacaaccagcacaacctctggtcctggaactactccaagccctgttcccagcaccagtacaacctctgctgctacaaccagcacaacctctgctcctacaaccagaacaacatctgctcctacaagcagcatgacctctggtcctggaactactcccagccctgttcccaccaccagcacaacctctgctcctacaactagcacaacctctggtcctggaactactcccagccctgttcccaccaccagcacaacctctgctcctataaccagcacaacctctggtcctggaagtactcccagccctgttcccaccaccagcacaacctctgctcctacaaccagcacaacctctgcctctacagccagcacaacctctggtcctggaactactcccagccctgttcccaccaccagcacaacctctgctcctacaaccagaacaacctctgcctctacagccagcacaacctctggtcctggaagtactcccagccctgttcccaccaccagcacaacctctgctcctacaaccagaacaacccctgcctctacagccagcacaacctctggtcctggaactactcccagccctgttcccaccacaagcacaacctctgcttctacaaccagcacaatctctctccctacaaccagcacaacctctgctcctataaccagcatgacctctggtcctggaactactcccagccctgttcccaccaccagcacaacctctgctcctacaaccagcacaacctctgcctctacagccagcacaacctctggtcctggaactactcccagccctgttcccaccaccagcacaacctctgctcctacaaccagcacaacctctgcctctacagccagcacaacctctggtcctggaacttctctcagccctgttcccaccacgagcacaacctctgctcctacaactagcacaacctctggtcctggaactactcccagccctgttcccaccaccagcacaacctctgctcctacaaccagcacgacctctggtcctggaactactcccagccccgttcccaccaccagcacaacccctgtttcaaagaccagcacaagccatctttctgtatccaagacaacccactcccaaccagtcaccagtgactgtcatcctctgtgcgcctggacaaagtggttcgacgtggacttcccatcccctggaccccacggcggggacaaggaaacctacaacaacatcatcaggagtggggaaaaaatctgccgccgacctgaggagatcaccaggctccagtgccgagccgagagccacccggaggtgaacattgaacacctgggtcaggtggtgcagtgcagccgtgaagagggcctggtgtgccggaaccaggaccagcagggacccttcaagatgtgcctcaactacgaggtgcgcgtgctctgctgcgagacccccagaggctgcccggtgacctctgtgaccccatatgggacttctcctaccaatgctctgtatccttccctgtctacttccatggtatccgcctccgtggcatccacctctgtggcatccagctctgtggcatccagctctgtggcttactccacccaaacctgcttctgcaacgtggctgaccggctctaccctgcaggatccaccatataccgccacagagacctcgctggccattgctattatgccctgtgtagccaggactgccaagtggtcagaggggttgacagtgactgtccgtccaccacgctgcctcctgccccagccacgtccccttcaatatccacctccgagcccgtcactgagctgggatgcccaaatgcggttccccccagaaagaaaggtgagacctgggccacacccaactgctccgaggccacctgtgagggcaacaacgtcatctccctgcgcccgcgcacgtgcccgagggtggagaagcccacttgtgccaacggctacccggctgtgaaggtggctgaccaagatggctgctgccatcactaccagtgccagtgtgtgtgcagcggctggggtgacccccactacatcaccttcgacggcacctactacaccttcctggacaactgcacgtacgtgctggtgcagcagattgtgcccgtgtatggccacttccgcgtgctcgtcgacaactacttctgcggtgcggaggacgggctctcctgcccgaggtccatcatcctggagtaccaccaggaccgcgtggtgctgacccgcaagccagtccacggggtgatgacaaacgagatcatcttcaacaacaaggtggtcagccccggcttccggaaaaacggcatcgtggtctcgcgcatcggcgtcaagatgtacgcgaccatcccggagctgggagtccaggtcatgttctccggcctcatcttctccgtggaggtgcccttcagcaagtttgccaacaacaccgagggccagtgcggcacttgcaccaacgacaggaaggatgagtgccgcacgcctagggggacggtggtcgcttcctgctccgagatgtccggcctctggaacgtgagcatacccgaccagccagcctgccaccggcctcacccgacgcccaccacggtcgggcccaccacagttgggtctaccacggtcgggcccaccacagttgggtctaccacggtcgggcccaccacaccgcctgctccgtgcctgccatcacccatctgccagctgattctgagcaaggtctttgagccgtgccacactgtgatccccccactgctgttctatgagggctgcgtctttgaccggtgccacatgacggacctggatgtggtgtgctccagcctggagctgtacgcggcactctgtgcgtcccacgacatctgcatcgattggagaggccggaccggccacatgtgcccattcacctgcccagccgacaaggtgtaccagccctgcggcccgagcaacccctcctactgctacgggaatgacagcgccagcctcggggctctgccggaggccggccccatcaccgaaggctgcttctgtccggagggcatgaccctcttcagcaccagtgcccaagtctgcgtgcccacgggctgccccaggtgtctggggccccacggagagccggtgaaggtgggccacaccgtcggcatggactgccaggagtgcacgtgtgaggcggccacgtggacgctgacctgccgacccaagctctgcccgctgccccctgcctgccccctgcccggcttcgtgcctgtgcctgcagccccacaggccggccagtgctgcccccagtacagctgcgcctgcaacaccagccgctgccccgcgcccgtgggctgtcctgagggcgcccgcgcgatcccgacctaccaggagggggcctgctgcccagtccaaaactgcagctggacagtgtgcagcatcaacgggaccctgtaccagcccggcgccgtggtctcctcgagcctgtgcgaaacctgcaggtgtgagctgccgggtggccccccatcggacgcgtttgtggtcagctgtgagacccagatctgcaacacacactgccctgtgggcttcgagtaccaggagcagagcgggcagtgctgtggcacctgtgtgcaggtcgcctgtgtcaccaacaccagcaagagccccgcccacctcttctaccccggcgagacctggtcagacgcagggaaccactgtgtgacccaccagtgtgagaagcaccaggatgggctcgtggtggtcaccacgaagaaggcgtgccccccgctcagctgttctctggacgaggcccgcatgagcaaggacggctgctgccgcttctgcccgccgcccccgcccccgtaccagaaccagtcgacctgtgctgtgtaccataggagcctgatcatccagcagcagggctgcagctcctcggagcccgtgcgcctggcttactgccgggggaactgtggggacagctcttccatgtactcgctcgagggcaacacggtggagcacaggtgccagtgctgccaggagctgcggacctcgctgaggaatgtgaccctgcactgcaccgacggctccagccgggccttcagctacaccgaggtggaagagtgcggctgcatgggccggcggtgccctgcgccgggcgacacccagcactcggaggaggcggaacccgagcccagccaggaggcagagagtgggagctgggagagaggcgtcccagtgtcccccatgcactgaccagcactgccgccctcctgacctccaaggagaacctcccatatgtcctctgagctcggcttccaaggccagtggaacttgtgcccctgtccaggcggctgcagctttgaacacactgtccacgcccgctttcttgtggagggtgtgggctatgggtcacctgctgcctggaggaggggcccttacccaccccgcctgcagccacctctcaggaccagccccggggctggccgagctcctctggccatgcatccagcctgctgttctggggacgtgagcatcacctgagggtctcaggaatgacgcttggacatggtgatcagctgcctggtggctgcaggaggaagaacctcactcctacctcagccctcagcctgcgctcccctcctcagtacacggccaatctgttgcataaatacacttgagcattttgcaa

SEQ ID NO: 438 - RNA, 17448 nt, Homo sapiens
  source 1..17448: mol_type = mRNA
ttgcaaaatgctcaagtgtatttatgcaacagattggccgtgtactgaggaggggagcgcaggctgagggctgaggtaggagtgaggttcttcctcctgcagccaccaggcagctgatcaccatgtccaagcgtcattcctgagaccctcaggtgatgctcacgtccccagaacagcaggctggatgcatggccagaggagctcggccagccccggggctggtcctgagaggtggctgcaggcggggtgggtaagggcccctcctccaggcagcaggtgacccatagcccacaccctccacaagaaagcgggcgtggacagtgtgttcaaagctgcagccgcctggacaggggcacaagttccactggccttggaagccgagctcagaggacatatgggaggttctccttggaggtcaggagggcggcagtgctggtcagtgcatgggggacactgggacgcctctctcccagctcccactctctgcctcctggctgggctcgggttccgcctcctccgagtgctgggtgtcgcccggcgcagggcaccgccggcccatgcagccgcactcttccacctcggtgtagctgaaggcccggctggagccgtcggtgcagtgcagggtcacattcctcagcgaggtccgcagctcctggcagcactggcacctgtgctccaccgtgttgccctcgagcgagtacatggaagagctgtccccacagttcccccggcagtaagccaggcgcacgggctccgaggagctgcagccctgctgctggatgatcaggctcctatggtacacagcacaggtcgactggttctggtacgggggcgggggcggcgggcagaagcggcagcagccgtccttgctcatgcgggcctcgtccagagaacagctgagcggggggcacgccttcttcgtggtgaccaccacgagcccatcctggtgcttctcacactggtgggtcacacagtggttccctgcgtctgaccaggtctcgccggggtagaagaggtgggcggggctcttgctggtgttggtgacacaggcgacctgcacacaggtgccacagcactgcccgctctgctcctggtactcgaagcccacagggcagtgtgtgttgcagatctgggtctcacagctgaccacaaacgcgtccgatggggggccacccggcagctcacacctgcaggtttcgcacaggctcgaggagaccacggcgccgggctggtacagggtcccgttgatgctgcacactgtccagctgcagttttggactgggcagcaggccccctcctggtaggtcgggatcgcgcgggcgccctcaggacagcccacgggcgcggggcagcggctggtgttgcaggcgcagctgtactgggggcagcactggccggcctgtggggctgcaggcacaggcacgaagccgggcagggggcaggcagggggcagcgggcagagcttgggtcggcaggtcagcgtccacgtggccgcctcacacgtgcactcctggcagtccatgccgacggtgtggcccaccttcaccggctctccgtggggccccagacacctggggcagcccgtgggcacgcagacttgggcactggtgctgaagagggtcatgccctccggacagaagcagccttcggtgatggggccggcctccggcagagccccgaggctggcgctgtcattcccgtagcagtaggaggggttgctcgggccgcagggctggtacaccttgtcggctgggcaggtgaatgggcacatgtggccggtccggcctctccaatcgatgcagatgtcgtgggacgcacagagtgccgcgtacagctccaggctggagcacaccacatccaggtccgtcatgtggcaccggtcaaagacgcagccctcatagaacagcagtggggggatcacagtgtggcacggctcaaagaccttgctcagaatcagctggcagatgggtgatggcaggcacggagcaggcggtgtggtgggcccgaccgtggtagacccaactgtggtgggcccgaccgtggtagacccaactgtggtgggcccgaccgtggtgggcgtcgggtgaggccggtggcaggctggctggtcgggtatgctcacgttccagaggccggacatctcggagcaggaagcgaccaccgtccccctaggcgtgcggcactcatccttcctgtcgttggtgcaagtgccgcactggccctcggtgttgttggcaaacttgctgaagggcacctccacggagaagatgaggccggagaacatgacctggactcccagctccgggatggtcgcgtacatcttgacgccgatgcgcgagaccacgatgccgtttttccggaagccggggctgaccaccttgttgttgaagatgatctcgtttgtcatcaccccgtggactggcttgcgggtcagcaccacgcggtcctggtggtactccaggatgatggacctcgggcaggagagcccgtcctccgcaccgcagaagtagttgtcgacgagcacgcggaagtggccatacacgggcacaatctgctgcaccagcacgtacgtgcagttgtccaggaaggtgtagtaggtgccgtcgaaggtgatgtagtgggggtcaccccagccgctgcacacacactggcactggtagtgatggcagcagccatcttggtcagccaccttcacagccgggtagccgttggcacaagtgggcttctccaccctcgggcacgtgcgcgggcgcagggagatgacgttgttgccctcacaggtggcctcggagcagttgggtgtggcccaggtctcacctttctttctggggggaaccgcatttgggcatcccagctcagtgacgggctcggaggtggatattgaaggggacgtggctggggcaggaggcagcgtggtggacggacagtcactgtcaacccctctgaccacttggcagtcctggctacacagggcataatagcaatggccagcgaggtctctgtggcggtatatggtggatcctgcagggtagagccggtcagccacgttgcagaagcaggtttgggtggagtaagccacagagctggatgccacagagctggatgccacagaggtggatgccacggaggcggataccatggaagtagacagggaaggatacagagcattggtaggagaagtcccatatggggtcacagaggtcaccgggcagcctctgggggtctcgcagcagagcacgcgcacctcgtagttgaggcacatcttgaagggtccctgctggtcctggttccggcacaccaggccctcttcacggctgcactgcaccacctgacccaggtgttcaatgttcacctccgggtggctctcggctcggcactggagcctggtgatctcctcaggtcggcggcagattttttccccactcctgatgatgttgttgtaggtttccttgtccccgccgtggggtccaggggatgggaagtccacgtcgaaccactttgtccaggcgcacagaggatgacagtcactggtgactggttgggagtgggttgtcttggatacagaaagatggcttgtgctggtctttgaaacaggggttgtgctggtggtgggaacggggctgggagtagttccaggaccagaggtcgtgctggttgtaggagcagaggttgtgctggtggtgggaacagggctgggagtagttccaggaccagaggttgtgctagttgtaggagcagaggttgtgctcgtggtgggaacagggctgagagaagttccaggaccagaggttgtgctggctgtagaggcagaggttgtgctggttgtaggagcagaggttgtgctggtggtgggaacagggctgggagtagttccaggaccagaggttgtgctggctgtagaggcagaggttgtgctggttgtaggagcagaggttgtgctggtggtgggaacagggctgggagtagttccaggaccagaggtcatgctggttataggagcagaggttgtgctggttgtagggagagagattgtgctggttgtagaagcagaggttgtgcttgtggtgggaacagggctgggagtagttccaggaccagaggttgtgctggctgtagaggcaggggttgttctggttgtaggagcagaggttgtgctggtggtgggaacagggctgggagtacttccaggaccagaggttgtgctggctgtagaggcagaggttgttctggttgtaggagcagaggttgtgctggtggtgggaacagggctgggagtagttccaggaccagaggttgtgctggctgtagaggcagaggttgtgctggttgtaggagcagaggttgtgctggtggtgggaacagggctgggagtacttccaggaccagaggttgtgctggttataggagcagaggttgtgctggtggtgggaacagggctgggagtagttccaggaccagaggttgtgctagttgtaggagcagaggttgtgctggtggtgggaacagggctgggagtagttccaggaccagaggtcatgctgcttgtaggagcagatgttgttctggttgtaggagcagaggttgtgctggttgtagcagcagaggttgtactggtgctgggaacagggcttggagtagttccaggaccagaggttgtgctggttgtaggagcagaagttgtgctggttgtagaggcagaggttgtgctggtggtgggaacagggcttggagtagttccagaaccggaggttgtgctgcttgtagcagctgaggttttgctggtctgtggagtggaggttgtgctgcttgtaggggaagagattgtgctggttgtaggggcagagattgtgctggttgtagaggcagagattgtgctggttgtaggagcagagtttgtgctggttgttggagcagaggttgtgctggttgtaggagccaaggttgtgctggttgtaggaccagaagtcgttctgtgtgtaggagctgaggtcgtgctggttgtaggggcagaggttgtgctggttgtaggggcagaggttgtgctgggtgtagaagcagggattgtgctggttgtaggggcagaggttgtgctggtctgtggagtggaggttgtgctggttgtcaccaaagtggttgtcctggatttctgccaagaggaagtgctctgagttgggctggtggctctcccactaggggtgctaggagctgtcacaggtgtggaggtcacggggcagcctttgggggtctcgcagcagagcacacgcacctcgtagttgaggcacatcttgaagggtccctgctggtcctggttccggcacaccaggccctcttcccggctgcactgcaccacctggcccaggtgttcgatgctcacctccgggtggctctcggctcggcactggagcctggtgatctcctcaggtcggcggcagattttttccccactcctgatgatgttgttgtaggtttccttgtccccaccgtggggtccaggggatggaaagtccacgtcaaaccacttggtccaggtgcaccggggatgacagtctctggtgactggttgggagtgggttgtcttggatacagaaacatggcttgtgctggtctttgaaacagaggctgtgctggtggtgggaacggggctgggagtagttccagaaccggaggttgtgctgcttgtagcagctgaggttttgctggtctgtggagtggagcttgtgctgcttgtagggggagaggttgtgctggttgtatggaaagaggttgtgctggttgtaggggcagagattgtgctggctgtaggagcagaggttgtgctgcttgtaggggcagaggatatgctggtctgtggagtggaggttgtgctggttgtaggggcagaagttgtgctggttgtaggagctgaggttgtgctagttgtaggggaagaggttgtgctggtctgcggagtggaggttgtgctggttgtaggggaagagattgtgctggtctgtggagtggaggttgtgctggttgtaggggcagagattgtgctggttatgggagcagaggtagtgctagttgtaggggcagaggttgtgttggttgtaggagccgaggaagtgctcgtaggagctgacgttgtgctggctgtgggagcagaggttgtgctggttgtaggggcagagattgtgctggttgtaggggcagagattgtgctggtggtaggagccgaggttgtgctgcttgtaggggcagaggatgtggtggtctgtggagtggaggttgtgctggttgtaggggcagaagttgtgctcgttgtgggagcagaggttgtgctggttgttggggcagaggttgtgctgggtatagaagcaggggttgtgctagttgtaggggcagaggttgtgctggtctgtgtagtggaggttatgctgcttgtcaccaaagtggttgtcctggatttctgccaagaggaggtgctctgagttgggctggtggctctcccactaggggtgctaggagctgtcacagatgtggaggtcacggggcagcctttgggggtctcgcagcaaagcacacgcacctcgtagttgaggcacatcttgaagggtccctgctggtcctggttccggcacaccaggccctcttcgcggctgcactgcaccacctggcccaggtgttcgatgctcacctccgggtggctcttggctcggcactggagcctggtgatctcctcaggtcggcggcagattttttccccactcctgatgatgttgttgtaggtttccttgtccccaccgtggggtccaggggatggaaagtccacatcaaaccatttggtccaggtgcaccggggatgacagtctctggtgactggttgggagtgggttgtcttggatacagaaacatggcttgtgctggtctttgaaacagaggctgtgctggtggtggtaacagggctgggagtagttccagaaccggaggttgtgctgcttgtagcagctgaggttttgctggtctgtggagtggaggttgtgctgcttgtaggggcagaggttgtgctggttgtagtagcagaggttgtgctggttgtaggggaagaggttgtgctggttgtaggggcagagattatgctggttgtacgagcagagattgtgctgcttgtaggagccgaggttgtgctgcttgtaggggcagaggatatgctggtctgtggagtggaggttgtgctggttgtaggggcagaagttgtgctggttgtgggagcagaggttgtgctggttgtaggagcagaggttgtgctggtctgtggagtggaggttgtgctggttgtcaccaaagtggttgtcctggatttctgccaagaggaagtgctctgagttgggctggtggctctcccactaggggtgctaggagctgtcacaggtgtggaggtcacggggcaacctttaggggtctcgcagcagagcacacgcacctcgtagttgaggcacatcttgaagggtccctgctggtcctggttccggcacaccaggccctcttcacggctgcactgcaccacctggcccaggtgttcaatgctcacctccgggtggctctcggctcggcactggagcctggtgatctcctcaggtcggcggcagattttttccccactcctgatgatgttgttgtaggtttccttgtccccgccgtggggtccaggggatgggaagtctatgtcaaaccacttggtccaggtgcaccggagatgacagtctctggtgactggttgggagtgggttgtcttggatatggaaacatggcttgtgctggtctttgaaacagaggctgtgctggtggtgggaacggggctgggagtggttccaggaccaggggttgtgctggttgtagaggcagaagtggtgctggttctaggagcaaagattgtgctggtggtgggaacagggctgggagtggttccaggaccagaggttttgctggctgtagaggcagaagttgtgctggttgtaggaggagaggttgtgctggtggtaggaatagggctgggagtagttccaagaccagaggttttgctggctgtagaggcagaggttgtgctggttgtaggagcagacgttgtgctggttgttggggccgagattgtgctggttgtagcggcagaggttgtgctggttgtaggagcagaggttgtgctggtggtgggaacagggcttggggtagttccaggaccagaagttatgctggtggtagaagccgaggttgtgctggtctgtggagaggaggttgtgctgcttgtaggggtagaggttgtgctggttgtaggggcagaggttgtgctggttgtaggagctaaggttgtgctggttgtaggggcagagggtgtgctggttgttggggccgagattgtgctggttgtaggggcagaggttgtgcttgttgtgggagcagaggttgtgctggtggtgggaacagggctgggagtagttccaggaccagaggttgtgctggttgtagaagcagaagttgtgctggtggtaggaacagagattgtgctggtggtaggaacagggctgggagtagttccaggaacagaagttgtgctggttgtaggaacagagattgtgctggttgtagtagctgaggttgtgctgcttgtaggggcagaggttgtgctggttgtaggggcagaggttgtgctggttgtaggagcagaggttgttctggttgtaggagcagaggttgtactggtggtgggaacagggctgggagtagttccagggccagaggttgtgctggttgtagcagtggaggttgtgctgcttgtagggacagaggttgttctggttgtaggggcagaggttgtgctggttgtaggggcagaggttgtgctggtggtgggaacagggcttgaagtagttccaggaccagaagttgtgctggttgtaggagccgaagttgtgctggtctgtggtgtggaagttgtgctgcttataggggcagaagttgtgctggttatagtagtagaggttgtgctggttgtaggagacaaagttgtgctggttgtaggggcagagattgtgctggttgtagtagcagaggttgtgctggttgtagtcgcagaggttgtgctggtggtagaggcagagattgtgctggttgtaggggctgaggttcttctgggtgtaggagcagaggtcgtgctggttgtagtggcagaggttgtgctggttgttggggccgagattgtgctggttgtaggggcagaggttgtgcttgttgtgggagcagaggttgtgctggtggtgggaacagggctgggagtagttccaggaccagaggttgtgctggttgtagaagcagaggttgtgctggttgtagaagcagaagttgtgctggtggtaggaacagagattgtgctggtggtaggaacagggctgggagtagttccaggaccagaggttgtgctagttgtagaagcagaggttgtgctggcggtaggaacagggctgggagtagtttcaggaccagagattctgctggttgtagtggcagaggttgtgctgcttataggggcagagtttgtgctggttgtaggtgcagaggttatgctggtggtgggaacagcactgggagtagttccaggaccagaggttgtgctggttgtaggagcagaggttgtgctcgtggtaggaacagggctgggagtagttccaggaccagaggttgtgctggttgtagtggcagaggttgtgctgcttataggggcagaggttgtgctggttgtaggagcagaggttgtgctggtggtgggaacagggctgggagtagttccagcaccagaggttgtgctggttgtagaagcagaggttgtgctggttgtaggagcagaggttgtgctggttgtaggagaagaggttgtgctggtggtaggaacaggtctaggagtagtttcaggaccagaggttgtgctggttgtagcggcagaggttgtgctgcttttaggagcagaagttgttcttgttgtaggggcagaggttgtgctggtcgtgggaacagggcttggggtagttccaggaccagaagttgtgctggttgtaggagccgaggttgtgctggtctgtggactggaggttgtgctgcttgtaggggcagaggttgtgctggttgtaggagctgaggttgtgctggttgtagtggcagaggttgtgctggtggtaggaacagggctgggagtagtttcaggaccagagattctgctggtggtagtggcagaggttgtgctgcttgtacgggcagaggttgtgctggttgtaggagcagaggttgtgctggttgtaggggcagaggttatgctggtggtaggaacagggctgggagtagttccaggaccagaggttgtgctgcttgtaggggcagaggttgtgctggttgtaggggcagaggttatgctagttgtaggagcagagattgtgctggtggtaggaacagggctgggagtatttccaggaccagaggttgtgctggctggagaggcagaggttgttctggttgtaggagcagaggttgttctggctgtaggagcagaggttgtgctggttgtatgggcataggttgtactggtctgtggagtggaggttgtgctggttgtcaccaaagtggttgtcctggatttctgccaagaggaggtgctctgagttgggctggtggctctcccactaggggtgctaggagctgtcacaggtgtggaggtcacggggcagcctttgggggtctcgcagcagagcacacgcacctcgtagttgaggcacatcttgaagggtccctgctggtcctggttccggcacaccaggccctcttcccggctgcactgcaccacctggcccaggtgttcgatgctcacctctgggtggctcttggctcggcactggagcctggtgatctcctcaggtcggcggcagattttttccccactcctgatgatgttgttgtaggtttccttgtctccaccatggggtccgggggacgggaagtccacgtcgaaccacgttgtccaggtgcaccggggatgacagtttctggtgactggtgtggtgtgggtgccctgtgtgacgctggttgctgtgggcccacccctggaggttgccgtgggttgctctgtggaggccgagggcatgtgtgtggtgaaggtggtctgggtctgagctccggttggatgtggagtcggccgtgtcgttgcgacggtctttggcggtctggtgatgtctctgcacacgttcaccgtctcgcaacactggatgcggatctcatagttgtagcagatgggtgggagctggttcttgttcaggcaaatcagcccctctgtgtggctgcagatgacgtcctgccccaggtctgccagcggcgtgttggggaagctctctgcccggcactgcacgcttcgaggactttcacagaatgtgtatccttcgtctctcaaattttgaaatgtgtcaaaatctccaccatttattccaggagcagggtagctgccatcaatccactcggtccaggtgcaaagctcctgcaggcaggaggatgtgctgggctccgtgggggtgggcttgctggagaccacagaggtccccggggccgtggtcgacatggatgatgttgatgttgccggcactggcggagggctgggagttgagaaagtttttttgacagaggtagcggtacctggggcaggtgtcgtcctggctgtagagagagacacggtgccaggtgtgctgctgggggctgaggagcctgaggcctgggtttcagtggtcttggaggttgttgaaggagtggtctgggctggactgctagaggtggagccaggtgtggaggtcatgtggcagcctctgggggtctcgcagcagagcacacgcacctcgtagttgaggcacatcttgaagggtccctgctggtcctggttccggcacaccaggccctcttcccggctgcactgcaccacctggcccaggtgttcgatgctcacctctgggtggctcttggctcggcactggagcctggtgatctcctcaggtcggcggcagattttttccccactcctgatgatgttgttgtaggtttccttgtctccaccatggggtccgggggacgggaagtccacgtcgaaccactttgtccaggtgcaccggggatgacagtttctggtgactagtgtggtgtgggtgccctgtgtgacgctggttgctgtgggcccacccctggaggttgccgtgggttgctctgtggaggccgagggcatgtgtgtggtgaaggtggtctgggtctgagctccggttggatgtggagtcggccgtgtcgttgcgacggtctttggcagtctggtgatgtctctgcacacgttcaccgtctcgcaacactggatgcggatctcatagttgtagcagatgggtgggagctggttcttgttcaggcaaatcagcccctctgtgtggctgcagatgacgtcctgccccaggtctgccagcggcgtgttggggaagctctctgcccggcactgcacgcttcgaggactttcacagaatgtgtatccttcgtctctcaaattttgaaatgtgtcaaaatctccaccatttattccaggagcagggtagctgccatcgatccactcggtccaggtgcaaagctcctgcaggcaggaggatgtgctgggctccgtgggggtgggcttgctggagaccacagaggtccccggggccgtggtcgacatggatgatgttgatgttgccggcactggcggagggctgggagttgagaaagtttttttgacagaggtagcggtacctggggcaggtgtcgtcctggctgtagagagagacacggtgccaggtgtgctgctgggagctgaggagcctgaggcccgggtttcagtggtcttggaggtagttggaggagtggtctgggctggactgctagaggtggagcagggtaggggcgtgcagcactggaccctgatctggtagttgtagcagagccccgatgcctgctccctgttacgacaggtcagccccacatccgggctgcactgcacacgctgccccagggctcggagcggcactccgggggcgtcctcagctcggcactccaccgacctgggtgattcgcacacccggtacccatgggcgcggaggttctccagtgtgtcgaagtcaccgctgtccgtgccccgtccagggcggctgacatccatccatggcgaccacaggcacttttccccacagaccggcggcagtgaggcagaggctgtgggcagcctcgtcctgggagaagtgcctgctgtggtgggccaggcgctgctcggagggcctgtgtgcgcgctgcttgggccattgctgggggtgtgcgtggagctcacgacaagcgggggtgtggagaaggagaaggtggttggggggacaggggtggtggggctgcaggggtagaccctcctctcaatggtgccgttggccccgcagcgggcggagatgcagccacccgtgccatccgtcgtgtggtagatgacgtcccctgggtggaagcgctgtccattgtaggtgcagacacaggcctcagctttgtaggtgcactccacgccgcgctccgtacaaaggcaggactggcagttcttgtccgagggcaccactgcacctggccggtaggacttcccatggacgtggcaccgtggtggcagaggcggggttgggcaggtggccacacactgcatcttgtcctcatcaaagatgggagcctctggtgggcacttggggtagcagccttccaggccccggacgtcccgcaggcagtctccacgggggttccggcaggtgcgcaggcagggcaccccgcagggctggtagtgccactcgcactggccttcggggttgtagtagtcgcagaacagagggcagatgctcggggtccgccaggacacacacaggcctacttcatggcaggcctgggcgtaggcggccacagccgtgcagaagcactcgcagtcacccccggagtcgcaggcgcacgcgtcgttcacgcaggcctcgtagtacctggccggctccacgtgtgcgtggcaggcggcgaaggtggggccgtggaggatgctgcactgcttctgggcccaggacttgcggaaggggttggccgtgcaggggtccttgggcgccagggcatctgggcaggagggggagagcttccagctgttcccaaactccagcacgtcccccaccacagaccggctccgcgtggcaaagtcattaacggcgatgtcgtcgaagttcccacacaggccgcagaccctgcccttgaactcggggctgaggttgatgaagatgctggtcttcttgtcccacagcagcaccaggccaatgtcggtgtccaccaccaggtagatgcccatctgccggatggtgtatggcacctcctggctctcgtccgtcccgatcacctccaccttcccatggcttagcttcagctcgaagccccccaggaaaatcttgatggccttggagcaggtggtccctgtggtgccgcaggggacgttctcggtgacaacacgaaaggagtcctgggtgctgtctttcccgccacagtggttctgcaccagcgtgtactcgcagtctccgttgaagctgtagctctgtccgtcgaaggtgaggtagtggccgtccccgtacacggcgcaggtggccaggcaggggtcatctgtgcaccgccacatcctgctgtcacaggtgcaggtgttgcagcccacccggatggtctggccggcccggtagctggcctcattgtgcacgcaggggcagtcctccgcagtgatgcagccgccctcgccgtccgccaccagcccgtcggggcacacgcagccaggcacacactgggggctgtaacaggtcatgtccagtgtgtggcagctcttctgacagccagcccctgtgtccccgggcgtggcatttcggcagtcaaagaacaccatgggcgcagcacacactggggcgggggcttggcctccgatgcagctcagcttcccatgtgtgcaggtgcagatagccccgctgtcgtgcaccgactccccattggggatcatggagcctctgtggtagcagggacagttgctggcctgcacacacttgcccgtgtcgtccaggaaggtgcccttgggacagatgcagccatccacggggatgaagccaacactgcaggtgatgtccccctcgctcagggagcggcaggtgggctggcaggtgctgacatggtagtggtacgtcattgacttggggcaagtggtcataggcttcgtgcagacgccgtccctccagccgccgagctgcacgcccttggcggcacaggcgtgcacgtaggaggacagcgcggcgcacaggcagtcctcgctccgctcacagttgcaggtgtcaaacatgcagttcgagtagtaggttcccggcttcacggcagcatggcaccggccgaaggggccgtcggcatcggtcagctgcgagcaccagtgctgagcatacttctcattctccacgctcagagagcaggggtcctcgaagctgttcctgatgttggggcaggcggcctgggtcttgaaggtgttgaagaaggccgcagcggtggcctccaccaccccactgagggtccggaagtcatcggcctggatgctgttgaagttcccacagagaccgcaggtctgcccacggagcttgggcgccagctgcatgaacagctgcatggtgggcaccagctgcaggttcagctgcaggcccaggctggtctgggcgatgatgaagaaggttgagggtctgaagatggtgacgttggctgcagagatgggcagctgggtgtagatctggttcaggaacacttccccactggccttgatcaccaccaccgtctgcgccccatccaggctcagtgtcacgctcttcaggcaggtctcgctgtccgtcagcccgcacctgcgcagctcagccagtacagtgaaggcactgctgtcacagggcttggtcagcacatagctgcagtcgccgtgcaccgtgtattgcttcccgtcaaacgttgagaagtgggcacctccaagcacagagcaggtacccgggcatggaacctcctggcagctccaccggcctccggagcaggtgcagttggtgcagtctgtggagtaggtggcccctggggcataggcagccccgttgtagacgcaggcacactttgacacagggacacagccggtctggccgatgtcgtcaagcaccgtcccctcagggcagaagcagccggccacacagtggtcctcacaggcccgggagtgctcctggttggagcaggtgtctgcgcagggggagcggcactcgtggtactgcatgttgttggggcacttctgggggcagaagtcagggccccgccagtcctggggcaacccccctgcatgggtgcactgccgggagtactcggcaagggtgtggcagacgcagctgagcaggtcggtgtcttcacagaagcagaggtcttgcctgcaagcctccaggtagctgccgacgtccaccagggccacgcagccagagaacagctggccgtgcaggagctcctcacagatgccaaagccagtggagcagttcctcgggggttcagggacagggtcctgacactggtccgtggggtcgtccatcttctgcaggttcccgaattccatgggtgtcagcttggtgttgtgggagaggagctcgctgaccacgggcatcccgttgaagtccccacagagcccacaggtcttgttggcgtatttggtgtccagctccagcagcaggctgtcatcgtggttccacatgaggacaaggcccagcctggcctccaccttggtgtagctgctgctctgctgaatgaggaccccagactggctgaagggcagcaggaccgggtggccgttgaccaggacggagcccttggtcagctggatgaccacgccatccaccttcatgaggaccctgctcagcgtgggggccgctgactcctggctgcggcgtagctggatgttaaaatcctcgtaggcggcaccgcagtgctcggagaacacgtagttgcagaggccggggaagcggaagacgtcgccgtcgaaggtcttgtagtggaagctgccccaggtgctgcacacccgcccgttgtgcgccgggttggaggctcgtaccacagggatggtcctcagagatgggaagacagtcgccccacggagcgggaccccgctgggcccccgggcgataggagagagggcagggtggtgcttgtagctggattcggaggagccatcctgggcatggcctgtatgccgggtgcaggccagagcgagagccagggcccagagcagggccagcttcctccggccaacactcattgtgtggacggcggggaagagtgccctgtccctcagcagcctctgag

SEQ ID NO: 439 - RNA, 10749 nt, Mus musculus
  source 1..10749: mol_type = mRNA
cctcagaggctgccagtggggacatttccccatgctccacagcatgggtgtcggccggagaaagttggtcccattctgggtcctagccctggccctggcctgcagccaatgcacaggccaggctcaacaggactctctgaaatcgtaccatgaacaccgctctgatgttcctcaccctcaagggcatgttggtaccccactcaatagggtgaccatcatcccacctctgaagaccatccctgtggtacgagccttcaacccaggacataccaggcgggtgtgcagcacatggggcaacttccactacaagacctttgatggacaggtcttctacttccctggtctctgcaactatgtgttctctgcacactgtggggatgcctatgaggacttcaatatccagctacgccgtgtccaggagtctaataccaccactctgagtagggtcaccatgaagcttgatggcctagttgttgagctgaccaagagctccgtcttagtcaataaccacccggtccagctgccctttagccagtctggggtcctcattgagctcagcaatggctacctgaaggtggtggctaggctggggctgctcttcgtgtggaacgaggatgacagtcttctgctggagttggacaccaaatataccaacaagacttgtggtctctgtggagacttcaacggcagtccaaaatccaacgagttcctctccaacaatgttaggctgacaccccttgagtttgggaaccttcagaagatggacggccccacagagcagtgccaagaccccctccctgtgccccagaagaactgctccgccagatctggtatctgtgaaatgatcctaaaaggtgagctgttctcaggctgtgcggccctggtggacatcagcagctacgtggaggcttgccggcaggacgtctgtctctgtgagagcttggacccgtctgactgcatctgccataccctcgctgagtactcccggcagtgtgcacatgctggagggcagccccaggactggcggggccccaacctctgctcccagacatgtcccctcaacatgcagcaccaggaatgtggctcaccctgtgtggacacctgctccaacccccagcattcccaggtctgtgaggaccactgtattgctggctgcttctgtcctgagggtatggtgcttgatgacattaatcagatgggctgtgttcctgtgtcccagtgtgcctgcctgtacaatgggacactttatgcaccgggtaccaattactctactgactgcaccaacacatgttctggagggcagtggagctgccaggacatcccctgcgctggcacctgctcagtaatgggaggctcccacatgtccacatttgatggaaggcagtacacagtacatggggactgcacctatgtgctgagcaagccttgtgacagtaatgccttcactgtgctggttgagctgcgaaagtgtggactgacggaaagtgagacttgtctgaagactgtgacattgaacctgggtggggggcagacggagatcatggtgaaagctactggagaggtctttgtgaaccagatctacacccagttgccagtgtctacagccaatgctaccttcttccggccttcaaccttcttcatcgttggtgagaccaacctgggtttgcagcttgagatccagctgagtccaattatgcaaacatctgtgcgtctgaaacctgggctcagggggctaacctgtgggctctgtggtaacttcaacagtatgcaggctgatgacttccagactatcagtggggttgtggagggcacagcagctgctttcttcaacaccttcaagactcaggcggcttgtcccaatgtcaagaatatctttcaggacccctgctcgctcagcgtggagaatgaaaagtatgctcagcactggtgttctctgctgactaacgccagtggtccattttcccagtgccacgccaccgtgaaccccagcaccttcttctcgaactgcatgtatgacacgtgcaactgtgagaagagcgaggactgcatgtgtgcagccctgtcctcctatgtgcgtgcttgtgctgccaaaggcgtgctgctcagtgactggagggatggcatctgcacaaagcctacaattacctgtcccaagtcaatgacctatcaataccatatcagcacctgccagcccacctgccgtgctctgaatgagaaagatgtcacctgccatgtcagcttcatccctgtagatggctgcacctgccccaaaggcaccttcttagatgatttgggcaaatgtgtacaggctaccagctgtccttgctactacaagggatccacagttcccaatggcgagtctgtgcaggacagtggggccatttgcacctgcacccaaggagcactaacttgtattggaggtcctgccccgactccagtgtgtgatgcacccatgatctattttgactgtcacaatgccacacctggtgacactggagctggatgtcagaagagctgtcacaccctagacatgacctgttatagctccgagtgcgtgcctggctgtgtgtgccccaatgggctggtggcagatggaaatggaggctgtgttgttactgaggactgtccttgtgtgcacaatgaggccacctataggcctggggagaccatccaagtgggatgcaacaactgcacctgtgagaacaggatgtggcaatgcacagacaagccttgcctggccacctgtgctgtgtatggagatggccactacatcacttttgatgggcagcgctacagtttcaatggggactgcgagtacacactgctacaggacaactgtggtgggaatggcagctcccaggatgcctttcgtgttatcactgagaacatcccctgtggtactacaggaaccacctgctccaagagcatcaagatcttcctggggaactatgagctgaagttgagtgacagcaagatggaggtggtccagaaggatgtggggcaggagcccccttactttgtccaccagatgggcaactacctggtggtggaaactgacattggcctggtgcttttgtgggacaagaagactagcatctttctcagactcagccctgagttcaagggcagggtctgtggcctgtgtgggaactttgatgacaatgccatcaatgacttcaccacacgcagccagtccgtggtcagtgacatgttggagtttggaaatagctggaagttgtctccatcctgcccggatgtcctggtgcccaaggacccctgcactgccaacccttaccgcaagtcctgggcccaaaagcaatgcagcatcatcaacagcgaaactttctccgcctgccatgctcatgtggagccggccaagtactatgaagcttgtgtgaatgacgcctgtgcctgtgactcagggggtgactgcgagtgtttctgcaccactgtggccgcctatgcccaggcctgccatgaagtgggagtgtgtgtgtcctggaggacaccagacatctgcccactgttctgtgactactacaacccagagggtcagtgtgagtggcactaccagccgtgtggggccccctgcatgcgtacctgccagaaccctactggacagtgcctacaagatctccgtggtctggaaggatgctatcccaagtgcccaccaacagcccccatctttgatgagggcacaatgcagtgtgtatccaactgtacagtcaccttcccctgccgcgtcaatggaaagttgtaccggccaggtgcatcagtaccttcagacaaaaactgcgattcctgcatctgcacggagagtggtgtgcgctgtacccacaatgctggtgcctgtgtctgtacctacaacgggcaacagttccatcctggggagatcatctaccacacaacagatggcataggaggctgcatctctgcacactgcagggccaatggtaccatcgagaggagcgttgacacctgcaactccaccacccctacaccccccaccactttctccttctccacaccgcccgtcatgacctcaatgcaaccctccagcacacattccagccctaccccgagtgtagggtcctcaggggcctcaagcaaggctgcatcgacaaccagcagcatattgtctgtgaagagccctgttacagctcctatgaccatgtctacttcagcctccgccgtaaccacatcaggttgccgggaggagtgcctctggtctccctggatggatgttagccgtcctggacgtggcattgacagtggtgactttgacactctggagaacctccgtgcccatggctacccaatctgccaagtgccaaaagcagtagagtgccgtgctgaggctagccccggggtgcctcttcccgagctgcagcagcacctggagtgtagcacaacagtggggctgatctgttacaacagtgatcagctgtcagggctctgtgacaactaccagatcaaagtccagtgctgtacccccgtcagctgtccaacctcccagacgacccatgtgatatcatcctccaggacgactaatttggataacacaacctcctcagtccctgttacctcaactgagcacccatacagcagtacagttacctcaggttcttctacccacaccccaggtctgtctccctcttcctcagtgccttcttcaccaactccagcttcatctactcctgccccagtcagttctaccactgttaaaacaactctgcccatcactagcccaacaccagagccaactccagccatatcgtctgtgtccatctcaacctcagggtccaccatgccttcctctgagacaactcatgagtgcaaacaggagctttgcaattggaccaattggctagatggcagttaccctgggtctggcagaaacagtggagattttgacacctttgtgaacctgagatccaaaggatacaagttctgtgagaagccacgaaatgttgagtgcagggctcagttctttcccaacacaccactggaggagctggggcagaatgtgacctgcagccgagaggagggtttgatctgtttgaacaagaaccagctgccacccatgtgctacaactatgagatccggattgagtgctgcacagtggtaaacaactgttccacagcttcagttaccacacatcccacctcacatggagtcagcacgaaaacagagaccaactggaccacccatgtgtattcctctcccacaaaagacaccagtagtcactcagcaaccatagacacaaagacctggacctcaggtatttcacacacaaccactcaaccagtgaccacccactgccagctacagtgcaactggaccaagtggtttgacactgacttcccagtgcccgggccacatggaggggacctggaaacctatagcaacattgagaggagcggagagagactctgtcaccgagaggagatcacacagttgcaatgcagggctaagaactaccctgagagagagatggaggatctgggtcaggtggtgaagtgtgaccccagtgtgggcctggtgtgcaacaacagggaccaggggggcgactctgggatgtgcctcaactatgaggtgcgactgctgtgctgccacattcctgaaggctgctccatgaccacacatgtcactcttctcagcagcacaagtgagattgtcaccagctcaacacctggcaccacttccatgcatgtagcaagcagtacttccatgccccaaaccagctcacccaatacaggaaagaccagcaccatctctacaacccaaaccagctcacccaatacaggaaagaccagcaccacctctacaacccaaaccagctcacccaatacaggaaagaccagcaccatctctacaacccaaaccagctcacccaatacaggaaagaccagcaccacctctacaacccaaaccagctcacccaatacaggaaagaccagcaccatctctacaacccaaaccagctcacccaatacaggaaaggccagcaccccctcaacaccccataccagctcacccaatacaggaaagaccagcaccatctctacaacccaaaccagctcacccaatacaggaaagaccagcaccacctctacaacccaaaccagctcacccaatacaggaaagaccagcaccatctctacaacccaaaccagctcacccaatacaggaaaggccagcaccccctcaacaccccataccagctcacccaatacaggaaagaccagcaccatctctacaacccaaaccagctcacccaatacaggaaaggccagcaccccctcaacaccccaaaccagctcacccaatacaggaaagaccagcaccatctctacaacccaaaccagctcacccaatacaggaaagggcagcaccccctcaacaccccaaaccagctcacccaatacaggaaagaccagcaccatctctacaacccaaaccagctcacccaatacaggaaagaccagcaccacctctacaacccaaaccagctcacccaatacaggaaagaccagcaccatctctacaacccaaaccagctcacccaatacaggaaaggccagcaccccctcaacaccccataccagctcacccaatacaggaaagaccagcaccatctctacaacccaaaccagctcacccaatacaggaaaggccagcaccccatcaacaccccaaaccagctcacccaatacaggaaagaccagcaccatctctacaacccaaaccagctcacccaatacaggaaagggcagcaccccctcaacaccccaaaccagctcacccaatacaggaaagaccagcaccacctctacaacccaaaccagctcacccaatacaggaaaggccagcaccatctctacaacccaaactatctcaacctcagggtccaccatgccttcctctgaaacaactcatgagtgcaaacaggagctttgcaattggaccaattggctagatggcagttaccctgggtctggcagaaacagtggagattttgacacctttgtgaacctgagatccaaaggatacaagttctgtgagaagccacgaaatgttgagtgcagggctcagttctttcccaacacaccactggaggagctggggcagaatgtgacctgcagccgagaggagggtttgatctgtttgaacaagaaccagctgccacccatgtgctacaactatgagatccggattgagtgctgcacagtggtaaacaactgttccacagcttcagttaccacacatcccacctcacatggagtcagcacgaaaacagagaccaactggaccacccatgtgtattcctctcccacaaaagacaccagtagtcactcagcaaccatagacacaaagacctggacctcaggtatttcacacacaaccactcaaccagtgaccacccactgccagctacagtgcaactggaccaagtggtttgacactgacttcccagtgcccgggccacatggaggggacctggaaacctatagcaacattgagaggagcggagagagactctgtcaccgagaggagatcacacagttgcaatgcagggctaagaactaccctgagagagagatggaggatctgggtcaggtggtgaagtgtgaccccagtgtgggcctggtgtgcaacaacagggaccaggggggcgactctgggatgtgcctcaactatgaggtgcgactgctgtgctgtcacattcctgaagactgccccaggactgatcagacttctcctgtgacattatcccataagccctcatctgcagttgtgtcaccatcatctgtgtccccgtccttgtcgaccagccatagggttcactctaccactccctgcttctgcagcgtgtcaggccagctataccccttgggatccatcatctacaaccagacagaccttgatggccactgttactatgcgatgtgtagccaggattgtcaggtggtcaagagggttagtcaagactgcccctccaccatgccaccccctgcgacaactctatctacatctaccacgccacctgtcactgggcgggatcggtgcaatgtgtttcctccaagactgagaggagagacctggccaatgccgaattgttcccaagccacctgtgagggcaacaatgtcatctccttgagcccacgccagtgcccagagctgaatgaaccatcttgtgccaatggttacccacctctgaaggtggatgaccaggatggttgctgccagcactaccagtgccaatgtgtttgcagcgggtggggtgatccccactacatcacatttgatggcacctactacactttcctggataactgcacatacgtgctggtgcagcagatcgtgcccgtgtttggatacttccgtgtgctcattgacaactactactgtgacgtgggagacagcgtctcctgcccacagtccatcattgtggagtaccaccaggaccgtgtggtgctgacccgcaggccagttagcggggtcatgaccaaccagatcatcttcaacaacaaagtagtcagtcctggcttccagcagaatggcattgtcacctcccgtgtgggtatcaagatgtatgttaccatccaagagattggtgtccgggtcatgttttcaggtctcatcttctccgtcgaggtgcctttcaacttgtttgccaacaacacagagggccagtgcggcacttgcaccaatgacaaaaaggatgagtgccgcctgcctgggggttccatagcctcctcttgttctgagatgtccctccactggaaggtgcccaaccagccttcctgccaagggcctccaccaactccaacttcagtggtacccaggccttcacctactccgtgcccaccatcgccactctgtgagctcatcctaagcaataccttcaagctctgccatgacgtcatccccccgctgcagttctatcaaggctgcttatttgactactgccacatgctggacctggaggttgtatgctcaggcctagagctctatgcatcactctgtgcagcccaaggcgtgtgcattccctggagaagccaaaccaacaacacctgctcattcacgtgccctgataaccaagtataccagccttgtggcccatccaaccctcactactgctacagggatgatagcatcagcccaagcctgacccttcaagaggctggtcccaagacagagggctgcttctgtccagacagcacgacacttttcagtaccaatgactcaatctgcgtgccttcctgccaatggtgtctggggcctcgtggggagcctgtggagccgggtcacaccattagcatcgactgccaggactgcatctgtaaggaagccacgctaacctgccaaaagaaggcctgtcctcagcccacctgtccagagcctggctttgtgccagtgcctgtagccctggaggctggccaatgttgtccccagttcagctgtgcctgcaactccagccactgccctccgcctctgcactgcccgaagaattctagcctgatagtcacatacgaggagggagcttgctgcccgacccagaactgcagcagtcagaagggctgtgaagtcaacgggactctctaccagcctggtgacgtggtctcctccagcctatgtgagagatgcctgtgtgaggtttccagcaatcccctttccgatgtctttatggtcagctgtgagactgagctctgtaacacccagtgtcctaagggctctgagtaccaggccatgccagggcagtgctgtggcaagtgtataccgaagacctgcccttttaaaaacaacagtggttctacctacttctaccagcctggtgagttatgggcagaacctgggaacccgtgtgtgactcataagtgtgagaaattccaagatgtactcatggtcgtgacaatgaagacagagtgtcccaagatcaactgtccgcagggccaggctcagctgagagaagacggatgctgctatgactgtcccttacctaaccagcagaaatgtacggtgcaccaaagacagcagatcatccgtcagcaaaactgcagctctgagggcccagtgagcatctcctactgccaaggcaactgcggggacagcatctccatgtactccctggaggccaacaaggtagagcacacatgtgagtgttgccaggagctgcaaacctctcagaggaatgtgactctgcgctgcgatgatggctccagtcagaccttcagctacacccaggttgagaagtgtggctgcctgggccagcagtgccatgctttaggggacacaagccatgcagagtcctcagaacaagagttcaagtccaaggaaagtgaggaacatggccagcagttggcattcagggtcagcgaggacatgcttgggcctttccagtaaactgaatactgctgctgtcccaaccaaaaggtcctcccgaggccagaaagtggcttgaattctacctacctgccgcttcctcttcaagagggacatcgaccccagatggtcttggaggtaggagaggcccctctccactgattaggtggagacatggtggtctcgggctccttttgaaagaacttcatgatcacccaagggtcccatgaatgacagtcacttggatgcaggtatcatctgcttggcctcactttcacctcagacctgcacctatgaccccccccccaatccaaggaaatgaccaatatgttttataaatatactcgagagcatttatggat

SEQ ID NO: 440 - RNA, 10749 nt, Mus musculus
  source 1..10749: mol_type = mRNA
atccataaatgctctcgagtatatttataaaacatattggtcatttccttggattggggggggggtcataggtgcaggtctgaggtgaaagtgaggccaagcagatgatacctgcatccaagtgactgtcattcatgggacccttgggtgatcatgaagttctttcaaaaggagcccgagaccaccatgtctccacctaatcagtggagaggggcctctcctacctccaagaccatctggggtcgatgtccctcttgaagaggaagcggcaggtaggtagaattcaagccactttctggcctcgggaggaccttttggttgggacagcagcagtattcagtttactggaaaggcccaagcatgtcctcgctgaccctgaatgccaactgctggccatgttcctcactttccttggacttgaactcttgttctgaggactctgcatggcttgtgtcccctaaagcatggcactgctggcccaggcagccacacttctcaacctgggtgtagctgaaggtctgactggagccatcatcgcagcgcagagtcacattcctctgagaggtttgcagctcctggcaacactcacatgtgtgctctaccttgttggcctccagggagtacatggagatgctgtccccgcagttgccttggcagtaggagatgctcactgggccctcagagctgcagttttgctgacggatgatctgctgtctttggtgcaccgtacatttctgctggttaggtaagggacagtcatagcagcatccgtcttctctcagctgagcctggccctgcggacagttgatcttgggacactctgtcttcattgtcacgaccatgagtacatcttggaatttctcacacttatgagtcacacacgggttcccaggttctgcccataactcaccaggctggtagaagtaggtagaaccactgttgtttttaaaagggcaggtcttcggtatacacttgccacagcactgccctggcatggcctggtactcagagcccttaggacactgggtgttacagagctcagtctcacagctgaccataaagacatcggaaaggggattgctggaaacctcacacaggcatctctcacataggctggaggagaccacgtcaccaggctggtagagagtcccgttgacttcacagcccttctgactgctgcagttctgggtcgggcagcaagctccctcctcgtatgtgactatcaggctagaattcttcgggcagtgcagaggcggagggcagtggctggagttgcaggcacagctgaactggggacaacattggccagcctccagggctacaggcactggcacaaagccaggctctggacaggtgggctgaggacaggccttcttttggcaggttagcgtggcttccttacagatgcagtcctggcagtcgatgctaatggtgtgacccggctccacaggctccccacgaggccccagacaccattggcaggaaggcacgcagattgagtcattggtactgaaaagtgtcgtgctgtctggacagaagcagccctctgtcttgggaccagcctcttgaagggtcaggcttgggctgatgctatcatccctgtagcagtagtgagggttggatgggccacaaggctggtatacttggttatcagggcacgtgaatgagcaggtgttgttggtttggcttctccagggaatgcacacgccttgggctgcacagagtgatgcatagagctctaggcctgagcatacaacctccaggtccagcatgtggcagtagtcaaataagcagccttgatagaactgcagcggggggatgacgtcatggcagagcttgaaggtattgcttaggatgagctcacagagtggcgatggtgggcacggagtaggtgaaggcctgggtaccactgaagttggagttggtggaggcccttggcaggaaggctggttgggcaccttccagtggagggacatctcagaacaagaggaggctatggaacccccaggcaggcggcactcatcctttttgtcattggtgcaagtgccgcactggccctctgtgttgttggcaaacaagttgaaaggcacctcgacggagaagatgagacctgaaaacatgacccggacaccaatctcttggatggtaacatacatcttgatacccacacgggaggtgacaatgccattctgctggaagccaggactgactactttgttgttgaagatgatctggttggtcatgaccccgctaactggcctgcgggtcagcaccacacggtcctggtggtactccacaatgatggactgtgggcaggagacgctgtctcccacgtcacagtagtagttgtcaatgagcacacggaagtatccaaacacgggcacgatctgctgcaccagcacgtatgtgcagttatccaggaaagtgtagtaggtgccatcaaatgtgatgtagtggggatcaccccacccgctgcaaacacattggcactggtagtgctggcagcaaccatcctggtcatccaccttcagaggtgggtaaccattggcacaagatggttcattcagctctgggcactggcgtgggctcaaggagatgacattgttgccctcacaggtggcttgggaacaattcggcattggccaggtctctcctctcagtcttggaggaaacacattgcaccgatcccgcccagtgacaggtggcgtggtagatgtagatagagttgtcgcagggggtggcatggtggaggggcagtcttgactaaccctcttgaccacctgacaatcctggctacacatcgcatagtaacagtggccatcaaggtctgtctggttgtagatgatggatcccaaggggtatagctggcctgacacgctgcagaagcagggagtggtagagtgaaccctatggctggtcgacaaggacggggacacagatgatggtgacacaactgcagatgagggcttatgggataatgtcacaggagaagtctgatcagtcctggggcagtcttcaggaatgtgacagcacagcagtcgcacctcatagttgaggcacatcccagagtcgcccccctggtccctgttgttgcacaccaggcccacactggggtcacacttcaccacctgacccagatcctccatctctctctcagggtagttcttagccctgcattgcaactgtgtgatctcctctcggtgacagagtctctctccgctcctctcaatgttgctataggtttccaggtcccctccatgtggcccgggcactgggaagtcagtgtcaaaccacttggtccagttgcactgtagctggcagtgggtggtcactggttgagtggttgtgtgtgaaatacctgaggtccaggtctttgtgtctatggttgctgagtgactactggtgtcttttgtgggagaggaatacacatgggtggtccagttggtctctgttttcgtgctgactccatgtgaggtgggatgtgtggtaactgaagctgtggaacagttgtttaccactgtgcagcactcaatccggatctcatagttgtagcacatgggtggcagctggttcttgttcaaacagatcaaaccctcctctcggctgcaggtcacattctgccccagctcctccagtggtgtgttgggaaagaactgagccctgcactcaacatttcgtggcttctcacagaacttgtatcctttggatctcaggttcacaaaggtgtcaaaatctccactgtttctgccagacccagggtaactgccatctagccaattggtccaattgcaaagctcctgtttgcactcatgagttgtttcagaggaaggcatggtggaccctgaggttgagatagtttgggttgtagagatggtgctggcctttcctgtattgggtgagctggtttgggttgtagaggtggtgctggtctttcctgtattgggtgagctggtttggggtgttgagggggtgctgccctttcctgtattgggtgagctggtttgggttgtagagatggtgctggtctttcctgtattgggtgagctggtttggggtgttgatggggtgctggcctttcctgtattgggtgagctggtttgggttgtagagatggtgctggtctttcctgtattgggtgagctggtatggggtgttgagggggtgctggcctttcctgtattgggtgagctggtttgggttgtagagatggtgctggtctttcctgtattgggtgagctggtttgggttgtagaggtggtgctggtctttcctgtattgggtgagctggtttgggttgtagagatggtgctggtctttcctgtattgggtgagctggtttggggtgttgagggggtgctgccctttcctgtattgggtgagctggtttgggttgtagagatggtgctggtctttcctgtattgggtgagctggtttggggtgttgagggggtgctggcctttcctgtattgggtgagctggtttgggttgtagagatggtgctggtctttcctgtattgggtgagctggtatggggtgttgagggggtgctggcctttcctgtattgggtgagctggtttgggttgtagagatggtgctggtctttcctgtattgggtgagctggtttgggttgtagaggtggtgctggtctttcctgtattgggtgagctggtttgggttgtagagatggtgctggtctttcctgtattgggtgagctggtatggggtgttgagggggtgctggcctttcctgtattgggtgagctggtttgggttgtagagatggtgctggtctttcctgtattgggtgagctggtttgggttgtagaggtggtgctggtctttcctgtattgggtgagctggtttgggttgtagagatggtgctggtctttcctgtattgggtgagctggtttgggttgtagaggtggtgctggtctttcctgtattgggtgagctggtttgggttgtagagatggtgctggtctttcctgtattgggtgagctggtttggggcatggaagtactgcttgctacatgcatggaagtggtgccaggtgttgagctggtgacaatctcacttgtgctgctgagaagagtgacatgtgtggtcatggagcagccttcaggaatgtggcagcacagcagtcgcacctcatagttgaggcacatcccagagtcgcccccctggtccctgttgttgcacaccaggcccacactggggtcacacttcaccacctgacccagatcctccatctctctctcagggtagttcttagccctgcattgcaactgtgtgatctcctctcggtgacagagtctctctccgctcctctcaatgttgctataggtttccaggtcccctccatgtggcccgggcactgggaagtcagtgtcaaaccacttggtccagttgcactgtagctggcagtgggtggtcactggttgagtggttgtgtgtgaaatacctgaggtccaggtctttgtgtctatggttgctgagtgactactggtgtcttttgtgggagaggaatacacatgggtggtccagttggtctctgttttcgtgctgactccatgtgaggtgggatgtgtggtaactgaagctgtggaacagttgtttaccactgtgcagcactcaatccggatctcatagttgtagcacatgggtggcagctggttcttgttcaaacagatcaaaccctcctctcggctgcaggtcacattctgccccagctcctccagtggtgtgttgggaaagaactgagccctgcactcaacatttcgtggcttctcacagaacttgtatcctttggatctcaggttcacaaaggtgtcaaaatctccactgtttctgccagacccagggtaactgccatctagccaattggtccaattgcaaagctcctgtttgcactcatgagttgtctcagaggaaggcatggtggaccctgaggttgagatggacacagacgatatggctggagttggctctggtgttgggctagtgatgggcagagttgttttaacagtggtagaactgactggggcaggagtagatgaagctggagttggtgaagaaggcactgaggaagagggagacagacctggggtgtgggtagaagaacctgaggtaactgtactgctgtatgggtgctcagttgaggtaacagggactgaggaggttgtgttatccaaattagtcgtcctggaggatgatatcacatgggtcgtctgggaggttggacagctgacgggggtacagcactggactttgatctggtagttgtcacagagccctgacagctgatcactgttgtaacagatcagccccactgttgtgctacactccaggtgctgctgcagctcgggaagaggcaccccggggctagcctcagcacggcactctactgcttttggcacttggcagattgggtagccatgggcacggaggttctccagagtgtcaaagtcaccactgtcaatgccacgtccaggacggctaacatccatccagggagaccagaggcactcctcccggcaacctgatgtggttacggcggaggctgaagtagacatggtcataggagctgtaacagggctcttcacagacaatatgctgctggttgtcgatgcagccttgcttgaggcccctgaggaccctacactcggggtagggctggaatgtgtgctggagggttgcattgaggtcatgacgggcggtgtggagaaggagaaagtggtggggggtgtaggggtggtggagttgcaggtgtcaacgctcctctcgatggtaccattggccctgcagtgtgcagagatgcagcctcctatgccatctgttgtgtggtagatgatctccccaggatggaactgttgcccgttgtaggtacagacacaggcaccagcattgtgggtacagcgcacaccactctccgtgcagatgcaggaatcgcagtttttgtctgaaggtactgatgcacctggccggtacaactttccattgacgcggcaggggaaggtgactgtacagttggatacacactgcattgtgccctcatcaaagatgggggctgttggtgggcacttgggatagcatccttccagaccacggagatcttgtaggcactgtccagtagggttctggcaggtacgcatgcagggggccccacacggctggtagtgccactcacactgaccctctgggttgtagtagtcacagaacagtgggcagatgtctggtgtcctccaggacacacacactcccacttcatggcaggcctgggcataggcggccacagtggtgcagaaacactcgcagtcaccccctgagtcacaggcacaggcgtcattcacacaagcttcatagtacttggccggctccacatgagcatggcaggcggagaaagtttcgctgttgatgatgctgcattgcttttgggcccaggacttgcggtaagggttggcagtgcaggggtccttgggcaccaggacatccgggcaggatggagacaacttccagctatttccaaactccaacatgtcactgaccacggactggctgcgtgtggtgaagtcattgatggcattgtcatcaaagttcccacacaggccacagaccctgcccttgaactcagggctgagtctgagaaagatgctagtcttcttgtcccacaaaagcaccaggccaatgtcagtttccaccaccaggtagttgcccatctggtggacaaagtaagggggctcctgccccacatccttctggaccacctccatcttgctgtcactcaacttcagctcatagttccccaggaagatcttgatgctcttggagcaggtggttcctgtagtaccacaggggatgttctcagtgataacacgaaaggcatcctgggagctgccattcccaccacagttgtcctgtagcagtgtgtactcgcagtccccattgaaactgtagcgctgcccatcaaaagtgatgtagtggccatctccatacacagcacaggtggccaggcaaggcttgtctgtgcattgccacatcctgttctcacaggtgcagttgttgcatcccacttggatggtctccccaggcctataggtggcctcattgtgcacacaaggacagtcctcagtaacaacacagcctccatttccatctgccaccagcccattggggcacacacagccaggcacgcactcggagctataacaggtcatgtctagggtgtgacagctcttctgacatccagctccagtgtcaccaggtgtggcattgtgacagtcaaaatagatcatgggtgcatcacacactggagtcggggcaggacctccaatacaagttagtgctccttgggtgcaggtgcaaatggccccactgtcctgcacagactcgccattgggaactgtggatcccttgtagtagcaaggacagctggtagcctgtacacatttgcccaaatcatctaagaaggtgcctttggggcaggtgcagccatctacagggatgaagctgacatggcaggtgacatctttctcattcagagcacggcaggtgggctggcaggtgctgatatggtattgataggtcattgacttgggacaggtaattgtaggctttgtgcagatgccatccctccagtcactgagcagcacgcctttggcagcacaagcacgcacataggaggacagggctgcacacatgcagtcctcgctcttctcacagttgcacgtgtcatacatgcagttcgagaagaaggtgctggggttcacggtggcgtggcactgggaaaatggaccactggcgttagtcagcagagaacaccagtgctgagcatacttttcattctccacgctgagcgagcaggggtcctgaaagatattcttgacattgggacaagccgcctgagtcttgaaggtgttgaagaaagcagctgctgtgccctccacaaccccactgatagtctggaagtcatcagcctgcatactgttgaagttaccacagagcccacaggttagccccctgagcccaggtttcagacgcacagatgtttgcataattggactcagctggatctcaagctgcaaacccaggttggtctcaccaacgatgaagaaggttgaaggccggaagaaggtagcattggctgtagacactggcaactgggtgtagatctggttcacaaagacctctccagtagctttcaccatgatctccgtctgccccccacccaggttcaatgtcacagtcttcagacaagtctcactttccgtcagtccacactttcgcagctcaaccagcacagtgaaggcattactgtcacaaggcttgctcagcacataggtgcagtccccatgtactgtgtactgccttccatcaaatgtggacatgtgggagcctcccattactgagcaggtgccagcgcaggggatgtcctggcagctccactgccctccagaacatgtgttggtgcagtcagtagagtaattggtacccggtgcataaagtgtcccattgtacaggcaggcacactgggacacaggaacacagcccatctgattaatgtcatcaagcaccataccctcaggacagaagcagccagcaatacagtggtcctcacagacctgggaatgctgggggttggagcaggtgtccacacagggtgagccacattcctggtgctgcatgttgaggggacatgtctgggagcagaggttggggccccgccagtcctggggctgccctccagcatgtgcacactgccgggagtactcagcgagggtatggcagatgcagtcagacgggtccaagctctcacagagacagacgtcctgccggcaagcctccacgtagctgctgatgtccaccagggccgcacagcctgagaacagctcaccttttaggatcatttcacagataccagatctggcggagcagttcttctggggcacagggagggggtcttggcactgctctgtggggccgtccatcttctgaaggttcccaaactcaaggggtgtcagcctaacattgttggagaggaactcgttggattttggactgccgttgaagtctccacagagaccacaagtcttgttggtatatttggtgtccaactccagcagaagactgtcatcctcgttccacacgaagagcagccccagcctagccaccaccttcaggtagccattgctgagctcaatgaggaccccagactggctaaagggcagctggaccgggtggttattgactaagacggagctcttggtcagctcaacaactaggccatcaagcttcatggtgaccctactcagagtggtggtattagactcctggacacggcgtagctggatattgaagtcctcataggcatccccacagtgtgcagagaacacatagttgcagagaccagggaagtagaagacctgtccatcaaaggtcttgtagtggaagttgccccatgtgctgcacacccgcctggtatgtcctgggttgaaggctcgtaccacagggatggtcttcagaggtgggatgatggtcaccctattgagtggggtaccaacatgcccttgagggtgaggaacatcagagcggtgttcatggtacgatttcagagagtcctgttgagcctggcctgtgcattggctgcaggccagggccagggctaggacccagaatgggaccaactttctccggccgacacccatgctgtggagcatggggaaatgtccccactggcagcctctgagg

SEQ ID NO: 441 - RNA, 11534 nt, Rattus norvegicus
  source 1..11534: mol_type = mRNA
agaggctgccagtggggacatttccccatgctccatagcatgggtgttggccggagaaagttggccccattctgggtcctagccttggctctgaccttcaaccaacacacaggtcaggcccttgaggacactcggaaatctcaccttgaacactactctgacttatctcaacctcaagggcatgttggtaccccactcaatagagtgaccatcatcccacctctgaagaccattcctgtggtacgagccttcaacccagcacataccaggcgggtgtgcagcacatggggcaacttccactacaagacctttgatggacaggtcttctacttccctggtctgtgcaactatgtgttctcggaacactgtggggctgcctacgaggacttcaatatccagctacgccgtggcctggagtctaattccaccactctgagcagggtcatcatgaagcttgatggcctagttgttgagctgaccaagagctccgtcttagtcaataaccacccggtccagctgcccttcagccagtctggggtcctcattgagctcagcaatggctacctgaaggtggtggccaggctggggctggtcttcatgtggaatgatgatgacagtcttctgctggagttggacaccaaatatgccaacaagacttgtggtctctgtggagacttcaatggcagtccagaatccagcgagtttctctcccacaatgttaggctgacaccccttgagtttgggaactttcagaagatggacggccccacagagcagtgccaggaccccctccccgtgccccagaagaactgctccatcagatctagcatctgtgaagagatcctgaaaggtcagctgttctcaaactgtgcggccctggtggacatcagcagctacctggaggcttgccagcaggacctctgtctctgtgagagctctgacccgtctaactgcatctgccataccctggctgagtactctcggcagtgtgcacatgccggaggacagcctcagaactggcggggtcccaacctctgccctcagacctgtctcctcaacatggagtaccaggaatgtggctcaccctgtgtagacacctgctccaacccccagcattcccaggtctgtgaggaccactgtgttgctggctgcttctgtcctgagggtatggtgcttgatgacagtaaccagacgggctgtgtccctgtgtcccagtgtgcttgcctgtacaatgggacattgtatgcaccgggtaccagctattctactgactgcaccaacacgtgctctggaggtcagtggagctgccaggaagtcccatgctctggtacctgctcagtaatgggaggctcccacatctccacgtttgatgaaaggcagtacacagtacatggggactgcagctacgtgctgtgcaagccctatgacagcaatgccttcactgtgctggctgagctgcggaagtgtggattgactgagagcgagacttgtctgaagactgtgacgttgaacctgggtggggggaagacggtgatcacagtgaaagccactggagaggtctttgtgaaccagatctatacccagctgccggtatccacagccaacgctaccttcttccggccttcaaccttcttcatcattggccagaccaacctgggtttgcagcttgagatccagctgcatcccattatgcaggtgtccgtgcgcatagcacccgagttcagggggctaacctccgggctctgtggtaatttcaacagtatgcaggccgatgacttccagaccatcagtggggttgtggagggcacagcagctgctttcttcaacaccttcaagactcaggcggcttgtcccaatgttaagaatatctttgaggacccctgctcgctcagcgtggagaatgaaaagtatgcgcagcactggtgttctcagctgactgatgccaatggcccattttcccagtgccatgccacagtgaaccccagcaccttcttctcgaactgcatgtttgacacgtgcaactgtgagaagagtgaggactgcctgtgtgccgccctgtcctcctatgtgcgtgcctgtgctgccaaaggcgtgctgctcagtgactggagggagggcatatgcgaaaaacctacaattacctgtcccaagtcgatgacctatcaataccatatcagcacctgccagcccacctgccggtctctgagtgaggaagatgtcacctgccatgtcaacttcatccctgtggatggctgcacctgccccaaaggcaccttcttggatgattcgggcaaatgtgtacaggccactagctgtccttgctattacaagggatccccagttcccaatggcgagtctgtgcatgacaacggggccatttgcacctgcacccaaggagcactaacttgtattggaggtcctgtcctgactccagtgtgtgatgcccccatgatctattttgactgtcgtaatgccacacctggtgacactggagctggatgtcagaagagctgtcacaccctagatatgacctgctacagctccgagtgtgtgcctggctgtgtgtgcccgaatgggctggtggcagatggcaatggaagctgtgttgttgctgaggactgcccttgtgtgcacaatgaggccacctacaggcctggggagaccatccaagtgggctgcaacaactgcacctgtgagaacaggatgtggcagtgcacagacaagccttgcctggccacctgtgctgtgtacggggatgggcactatatcacttttgatgggcagcgctacagtttcagtggggactgcgagtacacactgctgcaggacaactgtggtgggaacggcagctcccaggatgcctttcgtgttgtcactgagaacattccctgtggtactacagggactacgtgctcaaagggaatcaagatcttcctggggagctatgagctgaaattgagtgacagcaagatggaggtggtccagaagggtgtggggcaggagcccccctacttcgtccatcagatgggcaactacctggtggtggaaaccgacattggcctggtgcttttgtgggacaagaagaccagcatctttctcagactcagccctgagttcaagggcaaggtctgtggcctgtgtgggaactttgatgacaatgccatcaatgacttcaccacacgcagccagtctgtggttagtgacatgctggagtttggaaatagctggaagttgtctccgtcctgcccggatgcctcagtgtccaaggatccctgcactgccaacccttaccgcaagtcctgggcccaaaagcaatgcagcatcatcaacagcgcaaccttctctgcctgccatgctcatgtggaaccggccaagtactatgaagcctgtgtgaatgacgcctgtgcctgtgactcagggggtgactgcgagtgcttctgcactgctgtggctgcctatgcccaggcctgccacgaagtgggagtgtgtgtgtcctggaggactccagacatctgtccactgttctgtgactactacaacccagagggtcagtgtgagtggcactaccagccgtgtggggccccctgcatgcgtacctgccagaaccctactggacagtgcctacaagatctccgtggcctggaaggctgctaccccaagtgcccaccaacagcccccatctttgatgagggcactatgcagtgtgtatccaactgtacagtcagcccctcaccctgccgtgtcaatggaaagttgtaccgaccaggtacaccgataccttcagatgaaaactgttattcctgtgtttgtacggagagtggtgtgaactgtacccatgatgctggtgcctgtgtttgtacctacaatgggcaacggtaccatcctggggacaccatctaccacacgacagatggcatgggaggttgtatctctgcacactgcagggacaatggcaccattgagaggatcgttgatacctgcagttccaccagccccccaccccccaccactttctccttctccacaacgctggtcatgacctcaatgcaaccctccagcacacattccagccctaccccgagcgtagtgtacccggggtccccaagcaaggccgtgttgacagccagcagcgtatcgtctgtgaagacccctgaaacaacctctgtcttgactacatctacttcagcctccaccttaaccatgccagcttgccaagaggagtgcctctggtctccctggatggatatcagccgtcctggacgtggcattgacagtggtgactttgacactctggagaacctccatgcccatggctaccagatctgcccagtgccaaaagcagtggagtgccgtgctgaggataaccctggggtgcctttccatgcactacagcagcatgtggagtgtagcacaactgtagggctgatctgttacaacagtgaccaggtgtcagggctctgtgacaactaccagatcaaaatccaatgctgtacccccatcaactgtccaacctccactggtcctacccagaccacccatttgatagtctccaggacaagtacgatggaggacacaacctcctcagtccctgtcacctcaactgagcacacatatagcacagttgcctcaagtccttctacccataccccaggtccttctccctcttcctccgtaccttcttcatcagctccagctcgatcgactcctactccagtcagttctaccactgttaaaacaactctgcccaccacaagcccaatgccagagccaacttcagccacatcgtctgtgtccatctcaaccttagggtccaccctagcctcccctgagataactcatgggtgcagaaaggagctttgcaattggactgattggatagatggcagctaccctgagcctggcagaagcagtggtgattttgacacctttgtaaacctgagagccaaagggtacaagttctgtgagaagccatggaatgttgagtgcagggctcagttctttcccaacacaccactgcaagagctgggacaggatgtgacctgtagccgagaagtgggtttgatctgtttgaacaagaaccagctgccacccatttgctacaactatgagatccggatagaatgctgcaccatagtaaacatctgttccacaacttcagctaccacacagcccacctcacatggagtcagcataaaaacaaagacgaactggatcacaaacacatattccttttccaccgagaataccagtggtcactcaacagtcataaacaccaagacctgggtcacaggtagtacacacacaacccctcaaccaggaacaaggccgacacccagcacagtgtccacccaggacaccagcaccagctctgtgcagacagacagcaccacctcctcatcccacaccagctcaccaaatacaggaagagtcagcaccacccacacaacccacaccagctcaccacctacaggaggaaccagccccacctccacaacccacaccagctcaccacctacaggaggaaccagccccacctccacaacccacaccagctcaccacctacaggaggaaccagccccacctccacaacccacaccagctcaccacctacaggaggaaccagccccacctccacaacccacaccagctcaccacctacaggaggaaccagccccacctccacaacccacaccagctcaccacctacaggaggaaccagccccacttccacaacccacaccagctcaccaaatacaggaagagtcagcaccacccacacaacccacaccagctcaccacctacaggaggaaccagccccacttccacaacccacaccagctcaccaaatacaggaggaaccagccccacctccacaacccacaccagctcaccaaatacaggaggaaccagccccacctccacaacccacaccagctcaccacctacaggaggaaccagccccacctccacaacccacaccagctcaccaaatacaggaggaaccagccccacctccacaacccacaccagctcaccacctacaggaggaaccagccccacttccacaacccacaccagctcaccacctacaggaggaaccagccccacttccacaacccacaccagcttaccacctacaggaggaaccagccccacctccacaacccacaccagctcaccacctacaggaggaaccagccccacctccacaacccacaccagctcaccacccataggagaaagcagcaccatttctaccacggatatcagaaccagctctacgcagatggcccacacaacattcgtggggaaaaccagcacgatctctggtcctggaaccagcaccacctccattcctaccagtaccacgggttccagctctcattttgaggtgactcgttccccagtgatggcccactgccagccacagtgcaactggaccaagtggcttgacactgacttcccagttcctggtccacatggaggggacctggaaacctatggcaacatcaagaagagcggagagagactctgtccttggccagaggagatcacacggttggaatgtagggctaaggactaccctgagagagcgatggaggatctgggtcaggtggtgcagtgtgaccccagcgtgggcctggtgtgcaagaacagcgaccagggacccacctttgggatgtgcctcaactatgaggtgcgactgctttgctgtcacgttcccgaagactgcctcaccaccaaacgtacaactctttccagcacccaaagtacgactgtcaccagctcaacacctggcactacttccatgccccaaactatgacaaccattgtacagacagacagtaccacctccacatctcaaacaagctcacccattacagggagagccagcaccatccacacaactcaaaccacctcaacatcaacaggagaagcctggaccagctctgtgcagatagccagcactacctccacaacccacaccagctcaccaaatacaggaagagtcagcaccacccacagaacccacagcagctcaccacctacaggaggaaccagccccacccacagaactcacaccagctcaccacctacaggaggaaccagccccacctccacaacccacatcagctcaccacctacaggaggaaccagccccacctccacaacccacaccagctcaccaaatacaggaagggtcaacaccacccacacaacccacaccagctcaccacccataggagaaaacagtaccacctccacatctcaaacaagctcacccattacagggagagccagcaccatccacacaactcaaaccacctcaacatcaacaggagaagcctggaccagctctgtgcagatagccagcaccacctccacaacccacaccagctcaccaaatacaggaagagtcagcaccacccacagaacccacaccagctcaccacccataggaggaaccagccccactcccacaacccacaccagctcaccacctacaggaggaaccagccccacctccacaacccacaccagctcaccacccataggaggaaccagccccacttccacaacccacaccagctcaccacctacaggaggaaccagccccacctccacaacccacaccagctcaccacctacaggaggaaccagccccacccacagaactcacaccagctcaccacctacaggaggaaccagccccacctccacaacccacaccagctcaccacctacaggaggaaccagccccacctccagaacccacaccagctcaccacctacaggaggaaccagccccacctccacaacccacaccagctcaccacctacaggaggaaccagccccacttccacaacccacaccagctcaccacctacaggaggaaccagccccacccacagaactcacaccagctcaccacctacaggaggaaccagccccacctccacaacccacaccagctcaccaaatacaggaagggtcaacaccacccacacaacccacaccagctcaccacccataggagaaagcagcaccatttctaccacggatatcagaaccagctctacgcagatggcccacacaacattcgtggggaaaaccagcacgatctctggtcctggaaccagcaccacctccattcctaccagcaccacgggttccagctctcattttgaggtgactcgttccccagtgacggcccactgccagccacagtgcaactggaccaagtggcttgacactgacttcccagttcctggtccacatggaggggacctggaaacctatggcaacatcaagaagagcggagagagactctgtccttggccagaggagatcacacggttggaatgcagggctaaggactaccctgagagagcgatggaggatctgggtcaggtggtgcagtgtgaccccagagtgggcctggtgtgcaagaacagcgaccagggacccacctttgggatgtgcctcaactatgaggtgcgactgctttgctgtcacattcctgaagactgcctcaggaccgaccggactcctgtgacatcccacaagacctcatttccagttgtgtcatcatcatctgtgtccacatcctcatctaccagtcctagagttcactctaccacccgttgtttctgcaccatgtcaggccaattataccctttgggaaccatcatctacaaccagacagaccttgacggccactgttactatgcgatgtgcagccatgattgtcaggtggtcaaaggggttagtcaggactgcccctccaccatgccaccccgtacaccaactctatccacatctaccgccccacctgtcactgagcgggattggtgcaatgtgtttcctccaagactgaaaggggagacctggcccatgcctaattgttcccaagccacatgtgagggcaacaatgttgtctctttgagcccacgccagtgtccagaggtgaaggagccatcttgtgccaatggctacccacctctgaaggtggatgaccaggacggttgctgccagcactaccagtgccagtgtgtttgcagcggctggggtgacccccactacatcacatttgacggcacctactacacttttctggacaattgcacatacgtgctggtgcagcagattgtgcctgtgtttggagacttccgtgtgctcattgacaactactactgtgacctgggagacagtgtttcctgcccacagtccatcattgtcgagtaccaccaggaccgtgtggtgctgacccgcaggccggttcacggggtcatgaccaaccagatcatcttcaacaacaaggtcgtgagtcctggcttccagcagaatggcattatcatctcccgtgtgggtatcaagatgtatgtcaccatccaagagattggtgtccaggtcatgttttcaggcctcatcttctcagttgaggtgcccttcaacttgtttgccaacaacacggagggccaatgcggcacttgtaccaatgacaaaaaggatgaatgccgcctgcctggaggttccatagcctcctcttgttctgagatgtccctccactggaaggtgcccaaccagccttcctgccaagggcctccaccaacaccaacttcaatggtacccaggtctacacctactccgtgctcaccatcgccactctgtcagctcatcctaagcgacgtcttcaagctctgccatgacatcatccccccgctgcagttctatgaaggctgcttatttgactactgccacatgttggacttggaggtggtgtgctcaggcctggagctctatgcatcactatgtgcagcccaaggcgtgtgcatcccctggagaagccataccaacaacacctgtccattcacgtgccctgaaaaccaagtataccagccttgtggtccttccaaccctcactactgctacaggaatgatgatatcagcctaagcttggccattcaaaaggctggtcctaagtcagagggctgcttctgtccagatgacatgacacttttcagttctaacgactcaatctgcgtgccttcctgccaatggtgtctggggcctcatggggaacctgtggagccgggccacaccatcagcatcaactgccaggactgcatctgtaaggagggcacgctgacctgccaagagaagttatgcccccagcccacctgtccagaacccggctttgtgccggtgtctgtagccctggaggctggccagtgttgttcccagttcagctgtgtctgcaactccagccactgccctcctcctttgcactgcccggagagttctagcctgatagtcacatatgaggagggaacttgctgcccaagccagaactgcagcagtcagaagggctgtgacgtcaacgggactctgtaccagcctggtgacgtggtctcctccagcctatgtgaaagatgcctgtgtgaagtttccagcaatgccttttccgatggctttgtagtcaactgtgagattgagctctgtaacacccaatgtcctaagggctttgagtaccagacgactccagggcactgctgtggccactgcataccgaagacctgcccctttaaaaacagcaataactccacttccctctacaagcctggtgagttctggccagaacctgggaacccgtgtgtgactcataagtgtgagaaattccaagatgtactcacggtggtgacaatgaagatagagtgccccaagatcaactgtccacaagaccaggctcagctgagagaagacggatgctgctatgactgtctcgtaccccagcagaaatgtacagtgcaccaaagacagcagatcatccgtcagcaaaactgcagctctgagggcccagtgagcctctcctactgccagggcaattgtggggacagcacctccatgtactctctggaggccaacacggtggaacacacgtgtgagtgttgccaggagctgcagacctcgcagaggagtgtgactctgcactgtgatgacggctccagtcggaccttcagctacacccaggttgagaagtgtggctgcctgggccagcggtgccatgctccaggtgacacaagccactcagagtcctcagaacaagagttcaagtccaaggaaagtgaggaacctggccagcagtcagcatccagggtcagcgaggacacccttgggcctttccagtaaaccaagcagcactgccgtcccaaccaagaagtcctcctgaggccagcaggacgtgtactttagtccaagtggcttgaattctacctacctgctgcttcctcttcaagagggaccccggatgttcttggaggtgggagaggcccctctccactgattaggagcgtgatggccacgggctccttttgaaagaacttcattatcaccaaagggtcccaggagtgacagtcacttggatgcaggtatcagcctcgctctcacctcagccctgctcctgtgtcccccatccccaggaaatgaccaatatgttttataaatatactcaagagcatttgtggattctc

SEQ ID NO: 442 - RNA, 11534 nt, Rattus norvegicus
  source 1..11534: mol_type = mRNA
gagaatccacaaatgctcttgagtatatttataaaacatattggtcatttcctggggatgggggacacaggagcagggctgaggtgagagcgaggctgatacctgcatccaagtgactgtcactcctgggaccctttggtgataatgaagttctttcaaaaggagcccgtggccatcacgctcctaatcagtggagaggggcctctcccacctccaagaacatccggggtccctcttgaagaggaagcagcaggtaggtagaattcaagccacttggactaaagtacacgtcctgctggcctcaggaggacttcttggttgggacggcagtgctgcttggtttactggaaaggcccaagggtgtcctcgctgaccctggatgctgactgctggccaggttcctcactttccttggacttgaactcttgttctgaggactctgagtggcttgtgtcacctggagcatggcaccgctggcccaggcagccacacttctcaacctgggtgtagctgaaggtccgactggagccgtcatcacagtgcagagtcacactcctctgcgaggtctgcagctcctggcaacactcacacgtgtgttccaccgtgttggcctccagagagtacatggaggtgctgtccccacaattgccctggcagtaggagaggctcactgggccctcagagctgcagttttgctgacggatgatctgctgtctttggtgcactgtacatttctgctggggtacgagacagtcatagcagcatccgtcttctctcagctgagcctggtcttgtggacagttgatcttggggcactctatcttcattgtcaccaccgtgagtacatcttggaatttctcacacttatgagtcacacacgggttcccaggttctggccagaactcaccaggcttgtagagggaagtggagttattgctgtttttaaaggggcaggtcttcggtatgcagtggccacagcagtgccctggagtcgtctggtactcaaagcccttaggacattgggtgttacagagctcaatctcacagttgactacaaagccatcggaaaaggcattgctggaaacttcacacaggcatctttcacataggctggaggagaccacgtcaccaggctggtacagagtcccgttgacgtcacagcccttctgactgctgcagttctggcttgggcagcaagttccctcctcatatgtgactatcaggctagaactctccgggcagtgcaaaggaggagggcagtggctggagttgcagacacagctgaactgggaacaacactggccagcctccagggctacagacaccggcacaaagccgggttctggacaggtgggctgggggcataacttctcttggcaggtcagcgtgccctccttacagatgcagtcctggcagttgatgctgatggtgtggcccggctccacaggttccccatgaggccccagacaccattggcaggaaggcacgcagattgagtcgttagaactgaaaagtgtcatgtcatctggacagaagcagccctctgacttaggaccagccttttgaatggccaagcttaggctgatatcatcattcctgtagcagtagtgagggttggaaggaccacaaggctggtatacttggttttcagggcacgtgaatggacaggtgttgttggtatggcttctccaggggatgcacacgccttgggctgcacatagtgatgcatagagctccaggcctgagcacaccacctccaagtccaacatgtggcagtagtcaaataagcagccttcatagaactgcagcggggggatgatgtcatggcagagcttgaagacgtcgcttaggatgagctgacagagtggcgatggtgagcacggagtaggtgtagacctgggtaccattgaagttggtgttggtggaggcccttggcaggaaggctggttgggcaccttccagtggagggacatctcagaacaagaggaggctatggaacctccaggcaggcggcattcatcctttttgtcattggtacaagtgccgcattggccctccgtgttgttggcaaacaagttgaagggcacctcaactgagaagatgaggcctgaaaacatgacctggacaccaatctcttggatggtgacatacatcttgatacccacacgggagatgataatgccattctgctggaagccaggactcacgaccttgttgttgaagatgatctggttggtcatgaccccgtgaaccggcctgcgggtcagcaccacacggtcctggtggtactcgacaatgatggactgtgggcaggaaacactgtctcccaggtcacagtagtagttgtcaatgagcacacggaagtctccaaacacaggcacaatctgctgcaccagcacgtatgtgcaattgtccagaaaagtgtagtaggtgccgtcaaatgtgatgtagtgggggtcaccccagccgctgcaaacacactggcactggtagtgctggcagcaaccgtcctggtcatccaccttcagaggtgggtagccattggcacaagatggctccttcacctctggacactggcgtgggctcaaagagacaacattgttgccctcacatgtggcttgggaacaattaggcatgggccaggtctcccctttcagtcttggaggaaacacattgcaccaatcccgctcagtgacaggtggggcggtagatgtggatagagttggtgtacggggtggcatggtggaggggcagtcctgactaacccctttgaccacctgacaatcatggctgcacatcgcatagtaacagtggccgtcaaggtctgtctggttgtagatgatggttcccaaagggtataattggcctgacatggtgcagaaacaacgggtggtagagtgaactctaggactggtagatgaggatgtggacacagatgatgatgacacaactggaaatgaggtcttgtgggatgtcacaggagtccggtcggtcctgaggcagtcttcaggaatgtgacagcaaagcagtcgcacctcatagttgaggcacatcccaaaggtgggtccctggtcgctgttcttgcacaccaggcccactctggggtcacactgcaccacctgacccagatcctccatcgctctctcagggtagtccttagccctgcattccaaccgtgtgatctcctctggccaaggacagagtctctctccgctcttcttgatgttgccataggtttccaggtcccctccatgtggaccaggaactgggaagtcagtgtcaagccacttggtccagttgcactgtggctggcagtgggccgtcactggggaacgagtcacctcaaaatgagagctggaacccgtggtgctggtaggaatggaggtggtgctggttccaggaccagagatcgtgctggttttccccacgaatgttgtgtgggccatctgcgtagagctggttctgatatccgtggtagaaatggtgctgctttctcctatgggtggtgagctggtgtgggttgtgtgggtggtgttgacccttcctgtatttggtgagctggtgtgggttgtggaggtggggctggttcctcctgtaggtggtgagctggtgtgagttctgtgggtggggctggttcctcctgtaggtggtgagctggtgtgggttgtggaagtggggctggttcctcctgtaggtggtgagctggtgtgggttgtggaggtggggctggttcctcctgtaggtggtgagctggtgtgggttctggaggtggggctggttcctcctgtaggtggtgagctggtgtgggttgtggaggtggggctggttcctcctgtaggtggtgagctggtgtgagttctgtgggtggggctggttcctcctgtaggtggtgagctggtgtgggttgtggaggtggggctggttcctcctgtaggtggtgagctggtgtgggttgtggaagtggggctggttcctcctatgggtggtgagctggtgtgggttgtggaggtggggctggttcctcctgtaggtggtgagctggtgtgggttgtgggagtggggctggttcctcctatgggtggtgagctggtgtgggttctgtgggtggtgctgactcttcctgtatttggtgagctggtgtgggttgtggaggtggtgctggctatctgcacagagctggtccaggcttctcctgttgatgttgaggtggtttgagttgtgtggatggtgctggctctccctgtaatgggtgagcttgtttgagatgtggaggtggtactgttttctcctatgggtggtgagctggtgtgggttgtgtgggtggtgttgacccttcctgtatttggtgagctggtgtgggttgtggaggtggggctggttcctcctgtaggtggtgagctgatgtgggttgtggaggtggggctggttcctcctgtaggtggtgagctggtgtgagttctgtgggtggggctggttcctcctgtaggtggtgagctgctgtgggttctgtgggtggtgctgactcttcctgtatttggtgagctggtgtgggttgtggaggtagtgctggctatctgcacagagctggtccaggcttctcctgttgatgttgaggtggtttgagttgtgtggatggtgctggctctccctgtaatgggtgagcttgtttgagatgtggaggtggtactgtctgtctgtacaatggttgtcatagtttggggcatggaagtagtgccaggtgttgagctggtgacagtcgtactttgggtgctggaaagagttgtacgtttggtggtgaggcagtcttcgggaacgtgacagcaaagcagtcgcacctcatagttgaggcacatcccaaaggtgggtccctggtcgctgttcttgcacaccaggcccacgctggggtcacactgcaccacctgacccagatcctccatcgctctctcagggtagtccttagccctacattccaaccgtgtgatctcctctggccaaggacagagtctctctccgctcttcttgatgttgccataggtttccaggtcccctccatgtggaccaggaactgggaagtcagtgtcaagccacttggtccagttgcactgtggctggcagtgggccatcactggggaacgagtcacctcaaaatgagagctggaacccgtggtactggtaggaatggaggtggtgctggttccaggaccagagatcgtgctggttttccccacgaatgttgtgtgggccatctgcgtagagctggttctgatatccgtggtagaaatggtgctgctttctcctatgggtggtgagctggtgtgggttgtggaggtggggctggttcctcctgtaggtggtgagctggtgtgggttgtggaggtggggctggttcctcctgtaggtggtaagctggtgtgggttgtggaagtggggctggttcctcctgtaggtggtgagctggtgtgggttgtggaagtggggctggttcctcctgtaggtggtgagctggtgtgggttgtggaggtggggctggttcctcctgtatttggtgagctggtgtgggttgtggaggtggggctggttcctcctgtaggtggtgagctggtgtgggttgtggaggtggggctggttcctcctgtatttggtgagctggtgtgggttgtggaggtggggctggttcctcctgtatttggtgagctggtgtgggttgtggaagtggggctggttcctcctgtaggtggtgagctggtgtgggttgtgtgggtggtgctgactcttcctgtatttggtgagctggtgtgggttgtggaagtggggctggttcctcctgtaggtggtgagctggtgtgggttgtggaggtggggctggttcctcctgtaggtggtgagctggtgtgggttgtggaggtggggctggttcctcctgtaggtggtgagctggtgtgggttgtggaggtggggctggttcctcctgtaggtggtgagctggtgtgggttgtggaggtggggctggttcctcctgtaggtggtgagctggtgtgggttgtggaggtggggctggttcctcctgtaggtggtgagctggtgtgggttgtgtgggtggtgctgactcttcctgtatttggtgagctggtgtgggatgaggaggtggtgctgtctgtctgcacagagctggtgctggtgtcctgggtggacactgtgctgggtgtcggccttgttcctggttgaggggttgtgtgtgtactacctgtgacccaggtcttggtgtttatgactgttgagtgaccactggtattctcggtggaaaaggaatatgtgtttgtgatccagttcgtctttgtttttatgctgactccatgtgaggtgggctgtgtggtagctgaagttgtggaacagatgtttactatggtgcagcattctatccggatctcatagttgtagcaaatgggtggcagctggttcttgttcaaacagatcaaacccacttctcggctacaggtcacatcctgtcccagctcttgcagtggtgtgttgggaaagaactgagccctgcactcaacattccatggcttctcacagaacttgtaccctttggctctcaggtttacaaaggtgtcaaaatcaccactgcttctgccaggctcagggtagctgccatctatccaatcagtccaattgcaaagctcctttctgcacccatgagttatctcaggggaggctagggtggaccctaaggttgagatggacacagacgatgtggctgaagttggctctggcattgggcttgtggtgggcagagttgttttaacagtggtagaactgactggagtaggagtcgatcgagctggagctgatgaagaaggtacggaggaagagggagaaggacctggggtatgggtagaaggacttgaggcaactgtgctatatgtgtgctcagttgaggtgacagggactgaggaggttgtgtcctccatcgtacttgtcctggagactatcaaatgggtggtctgggtaggaccagtggaggttggacagttgatgggggtacagcattggattttgatctggtagttgtcacagagccctgacacctggtcactgttgtaacagatcagccctacagttgtgctacactccacatgctgctgtagtgcatggaaaggcaccccagggttatcctcagcacggcactccactgcttttggcactgggcagatctggtagccatgggcatggaggttctccagagtgtcaaagtcaccactgtcaatgccacgtccaggacggctgatatccatccagggagaccagaggcactcctcttggcaagctggcatggttaaggtggaggctgaagtagatgtagtcaagacagaggttgtttcaggggtcttcacagacgatacgctgctggctgtcaacacggccttgcttggggaccccgggtacactacgctcggggtagggctggaatgtgtgctggagggttgcattgaggtcatgaccagcgttgtggagaaggagaaagtggtggggggtggggggctggtggaactgcaggtatcaacgatcctctcaatggtgccattgtccctgcagtgtgcagagatacaacctcccatgccatctgtcgtgtggtagatggtgtccccaggatggtaccgttgcccattgtaggtacaaacacaggcaccagcatcatgggtacagttcacaccactctccgtacaaacacaggaataacagttttcatctgaaggtatcggtgtacctggtcggtacaactttccattgacacggcagggtgaggggctgactgtacagttggatacacactgcatagtgccctcatcaaagatgggggctgttggtgggcacttggggtagcagccttccaggccacggagatcttgtaggcactgtccagtagggttctggcaggtacgcatgcagggggccccacacggctggtagtgccactcacactgaccctctgggttgtagtagtcacagaacagtggacagatgtctggagtcctccaggacacacacactcccacttcgtggcaggcctgggcataggcagccacagcagtgcagaagcactcgcagtcaccccctgagtcacaggcacaggcgtcattcacacaggcttcatagtacttggccggttccacatgagcatggcaggcagagaaggttgcgctgttgatgatgctgcattgcttttgggcccaggacttgcggtaagggttggcagtgcagggatccttggacactgaggcatccgggcaggacggagacaacttccagctatttccaaactccagcatgtcactaaccacagactggctgcgtgtggtgaagtcattgatggcattgtcatcaaagttcccacacaggccacagaccttgcccttgaactcagggctgagtctgagaaagatgctggtcttcttgtcccacaaaagcaccaggccaatgtcggtttccaccaccaggtagttgcccatctgatggacgaagtaggggggctcctgccccacacccttctggaccacctccatcttgctgtcactcaatttcagctcatagctccccaggaagatcttgattccctttgagcacgtagtccctgtagtaccacagggaatgttctcagtgacaacacgaaaggcatcctgggagctgccgttcccaccacagttgtcctgcagcagtgtgtactcgcagtccccactgaaactgtagcgctgcccatcaaaagtgatatagtgcccatccccgtacacagcacaggtggccaggcaaggcttgtctgtgcactgccacatcctgttctcacaggtgcagttgttgcagcccacttggatggtctccccaggcctgtaggtggcctcattgtgcacacaagggcagtcctcagcaacaacacagcttccattgccatctgccaccagcccattcgggcacacacagccaggcacacactcggagctgtagcaggtcatatctagggtgtgacagctcttctgacatccagctccagtgtcaccaggtgtggcattacgacagtcaaaatagatcatgggggcatcacacactggagtcaggacaggacctccaatacaagttagtgctccttgggtgcaggtgcaaatggccccgttgtcatgcacagactcgccattgggaactggggatcccttgtaatagcaaggacagctagtggcctgtacacatttgcccgaatcatccaagaaggtgcctttggggcaggtgcagccatccacagggatgaagttgacatggcaggtgacatcttcctcactcagagaccggcaggtgggctggcaggtgctgatatggtattgataggtcatcgacttgggacaggtaattgtaggtttttcgcatatgccctccctccagtcactgagcagcacgcctttggcagcacaggcacgcacataggaggacagggcggcacacaggcagtcctcactcttctcacagttgcacgtgtcaaacatgcagttcgagaagaaggtgctggggttcactgtggcatggcactgggaaaatgggccattggcatcagtcagctgagaacaccagtgctgcgcatacttttcattctccacgctgagcgagcaggggtcctcaaagatattcttaacattgggacaagccgcctgagtcttgaaggtgttgaagaaagcagctgctgtgccctccacaaccccactgatggtctggaagtcatcggcctgcatactgttgaaattaccacagagcccggaggttagccccctgaactcgggtgctatgcgcacggacacctgcataatgggatgcagctggatctcaagctgcaaacccaggttggtctggccaatgatgaagaaggttgaaggccggaagaaggtagcgttggctgtggataccggcagctgggtatagatctggttcacaaagacctctccagtggctttcactgtgatcaccgtcttccccccacccaggttcaacgtcacagtcttcagacaagtctcgctctcagtcaatccacacttccgcagctcagccagcacagtgaaggcattgctgtcatagggcttgcacagcacgtagctgcagtccccatgtactgtgtactgcctttcatcaaacgtggagatgtgggagcctcccattactgagcaggtaccagagcatgggacttcctggcagctccactgacctccagagcacgtgttggtgcagtcagtagaatagctggtacccggtgcatacaatgtcccattgtacaggcaagcacactgggacacagggacacagcccgtctggttactgtcatcaagcaccataccctcaggacagaagcagccagcaacacagtggtcctcacagacctgggaatgctgggggttggagcaggtgtctacacagggtgagccacattcctggtactccatgttgaggagacaggtctgagggcagaggttgggaccccgccagttctgaggctgtcctccggcatgtgcacactgccgagagtactcagccagggtatggcagatgcagttagacgggtcagagctctcacagagacagaggtcctgctggcaagcctccaggtagctgctgatgtccaccagggccgcacagtttgagaacagctgacctttcaggatctcttcacagatgctagatctgatggagcagttcttctggggcacggggagggggtcctggcactgctctgtggggccgtccatcttctgaaagttcccaaactcaaggggtgtcagcctaacattgtgggagagaaactcgctggattctggactgccattgaagtctccacagagaccacaagtcttgttggcatatttggtgtccaactccagcagaagactgtcatcatcattccacatgaagaccagccccagcctggccaccaccttcaggtagccattgctgagctcaatgaggaccccagactggctgaagggcagctggaccgggtggttattgactaagacggagctcttggtcagctcaacaactaggccatcaagcttcatgatgaccctgctcagagtggtggaattagactccaggccacggcgtagctggatattgaagtcctcgtaggcagccccacagtgttccgagaacacatagttgcacagaccagggaagtagaagacctgtccatcaaaggtcttgtagtggaagttgccccatgtgctgcacacccgcctggtatgtgctgggttgaaggctcgtaccacaggaatggtcttcagaggtgggatgatggtcactctattgagtggggtaccaacatgcccttgaggttgagataagtcagagtagtgttcaaggtgagatttccgagtgtcctcaagggcctgacctgtgtgttggttgaaggtcagagccaaggctaggacccagaatggggccaactttctccggccaacacccatgctatggagcatggggaaatgtccccactggcagcctct

SEQ ID NO: 443 - RNA, 17712 nt, Macaca mulatta
  source 1..17712: mol_type = mRNA
atgggtgtcggccagaggaagctggccccactctggaccctggctcttgctctggcctgcacccggcacacaggccatgcccaggacggctcctccgaatccagctacgagcaccaccctgccctctctcccatcgcccagggacctggtggggtcccgccccgtggggtgactctcttcccgcctctgaggaccatccccgtggtacgagcctccaacccggcacacaacgggcgggtgtgcagcacctggggcaacttccactacaagaccttcgacggcgacgtcttccgcttccccggcctctgcaactatgtgttctctgagcattgcggcgccgcctacgaggacttcaacgtccagctacgccgcagccaggagtcagcagcccccacgctgagcagggtcctcatgaaggtggatggcatggtcatccagctgaccaacggctctgtcctggtcaacggccgcccggtcctgctgcccttcagccagtctggggtcttcattcagcagagcagcagctacaccaaggtggaggccagactgggccttgtcctcatgtggaaccacgatgacagcctgctgctggagttggacgccaaatatgccaacgagacctgtgggctctgtggagacttcaatgggatgcccgtggtcagcgagctcctctcccacaacatcaagctgactcccatggagtttgggaacctgcagaagatggacgaccccacggagcagtgtgaggaccctgtccctgaacccccgaggaactgctccactggctctggcatctgcgaggagctcctgaatggtcagcttttctccagctgtgtggccctggtggacgtcggcagctacctggaggcctgcaggcaagacctctgcttctgcgggggcaccgacctgctcagctgcgtctgccacaccctcgcggagtactcccggcagtgcgcccacgccggggggcagccccaggactggcggggccctgacctctgcccccagacgtgccccagcaacatgcagtaccacgagtgccgctccccctgcacagacacctgctccaaccaggagcactcccgggcctgcgaggaccactgtgtggccggctgcttttgccctgaggggacggtgctcgatgacgtcggccagaccggctgtgtccctgtgtcacagtgtgcctgcgtctacaacggcactgcctatgccccgggggccacctactccacagactgcaccaactgcacctgctccggaggccggtggagctgccaggaggttccatgcccgggtacctgctctgtgcttggaggtgcccacttctcgacatttgacgagaggcactacacggtgcacggggactgcagctatgtgttgaccaagccctgtgacagcagtgccttcactgtactggctgagctgcgcaggtgtgggctgacggacagcgagacctgcctgaagagcgtgacactgagcctggacggggcgcagacggtggtggtgatcaaggccagcggggaagtgttcctgaaccagatatacacccagctgcccatctctgcagctaacgtcaccatcttcagaccttcgaccttcttcgtcatcgcccagaccagcctgggcctgcagctggacctgcagctggtacccaccatgcagctgttcgtgcggctggcgcccaagctccgagggcagacctgcggtctctgtgggaacttcaacagcatccaggccgatgacttccggaccctcagtggggtggtggaggccacggccgcggccttcttcaacaccttcaagacccaggccgcctgtcccaacatcaggaacagcttcgaagacccttgctccctgagtgtggagaacgagaagtatgctcagcactggtgctcgcagctgaccgatgccaacggccccttcagccggtgccacgctgccgtgaagccggacacctactactcgaactgcatgtttgacacctgcaactgtgagcggagcgaggactgcctgtgcgccgtgctgtcctcctatgtgcatgcctgtgccgccaagggtgtgcagctcagtggctggaggaacggcgtctgcacgaagcccatgaccacttgccccaagtcgatgacctaccactaccatgtcagcacctgccagcccacctgccgctctctgagtgagggggacatcacctgcagtgttggctttatccccgtggatggctgcatctgtcccgagggcaccttcctggacgacacgggcaagtgtgtgcaggccagcaactgtccctgctatcacaggggctccgtgatccccaatggggagtcggtgcacgacagtggggctgtctgcacctgcacgcatgggaagctgagctgcatcggaggccaagcccccaccccagtgtgtgctgcgcccatggtgttcttcgactgccgcaatgccacgcccggggacacgggggccggctgtcagaagagctgccacaccctggacatgacctgttacagcccccagtgtgtgcctggctgcgtgtgccccgatgggctggtggcagacggcgagggcaactgcatcactgtggaggactgcccctgcgtgcacaacgaggccagctaccgggccggccagaccatccgggttggctgcaatacctgcacttgtgacagcaggatgtggcggtgtacagatgacccctgcctggccacctgtgctgtgtacggggatggccactacctcaccttcgacgggcagagctacagcttcaacggagactgcgagtacatgctggtgcagaaccactgtggcgggaaaggcagcgtgcaggactccttccgtgttgtcactgagaacgtcccctgcggcaccacggggaccacctgctccaaggccatcaagatcttcctggggggctccgagctgaagctgagccacgggaaggtggaggtgactgggacgaacgagagccaggaggtgccatacaccatccggcagatgggcatctacctggtggtggacaccgacatcggcctggttctgctgtgggacaagaagaccagcatcttcatcaaccttagccccgagttcaagagcagggtctgcggcctgtgcgggaacttcgacgacattgccgccaacgactttgccacacggagccagtctgtggtgggggacgtgctggagttcgggaacagctggaagctctccccgtcctgcccggatgccctggtggccaaggacccctgcacggccaaccccttccgcaagtcctgggcccagaggcagtgcagcatcctccacggccccacctttgccgcctgccacgcacacgtggagccagccaggtactacgaggcctgtgtgaacgacgcatgtgcctgcgactcagggggtgactgcgagtgtttctgcacggctgtggccgcctatgcccaggcctgccatgaagcgggcctgtgtgtgtcctggcggaccccgagcatctgccctctgttctgtgactactacaacccggaaggccagtgcgagtggcactaccagccctgcggggcgccctgcctgcggacctgccggaacccgcgcggagagtgcctgcaggacgtccggggcctggaaggctgctaccccaagtgcccaccagaggctcccatctttgatgaggacaagatgcagtgtgtggccacctgcccaaccccacctccgccaccaccgtgccacgtccacgggaagtcctaccggccaggcgcagtggtgccctcagacaagaactgccactcctgcctatgcactgagcgcggcgtggagtgtacctacgaagctgaggcctgtgtctgcacctacgacggacagagcttccacccaggggacgtcatctaccacacgacggacggcacgggtggctgcatctctgcccgctgtggggccaacggcaccattgagaggagggtctacccctgcagccccaccacccccgtccccccaaccaccttctccttctccacgcccccactcgtcgtgagctccacgcacgcctccagccctgtcccgagcagcgcgcacacaggccctccaagcagcgcctggcccaccacagcaggcacttctcccaggacgaggccgcccacagcctctgcctcgctgccgccggtctgtggggaagagtgcctgtggtcaccttggatggacgttagccgccctggacagggcatggacagcggtgactttgacacgctgaagaacctccgcgcccatgggtacctggtgtgcgaatcacccaggtcggtggagtgccgagccgaggacgccccccgagtgccgctccgagccctggggcagcatgtgcagtgcagcccggacatggggctgacctgtcgtaacagggagcaggcatcggggctctgctacaactaccagatcagggtcctgtgttgcacgcccctagcctgctccacctctagcagttcaacccagaccactcctccaacaacctccaagaccactgaaacccgggcctcagcctcctcagtccccagcagcacacctggccccgtgtctctctctacatccaggacaacacctgccccaggtaccgctacatctgtcaaaagaactttctcaactcccagccctccgccagtgccagcaacatcaacatcgtccgtgtcgaccacggccccggggacctctgtggtctccagcaagcccagccacaccgagtccatcacaccctcctgtgtacacgagctttgcacctggaccgagtggatcgacggcagctaccctgatcccggaataaatggcggagattttgacacttttcaaaatttgagagacgaagggtacaaattctgtgaaaatcctcgaagcgtggagtgccgggcagtgggcttccccaacacgccgctggcagacctggggcaggacgtcatctgtagccgcacggaggggttgatttgcctgaacaagaatcagctcccacccatctgctacaactacgagatccgcatccagtgttgcaagacggtgaacaagtgcagagacggcaccggaacgctgaagaccatcacaacgacacggccgactccacacccggctggagctcagacccagaccaccttcaccacacacgtgccctcggcctccacggagcaacccacagccacctccaggggcgggtccacagcaaccagcgtcacacaggacacccacaacagatcggtcaccagagattgtcatccccagtgcacctggaccaagtggttcgacgtggacttcccgtcccctggaccccacggcggagatgaggaaacctacaacaacatcatcagaagtggggaaaaaatctgccgccaacctgaggagatcaccaggctccagtgccgagccacaagccacccggaggtgagcatcgaacacctgggccaggtggtgcagtgcagccgcgaagagggcctggtgtgccggaaccaggaccagcagggacccttcaagatgtgcctcaactacgaggtgcgcgtgctctgctgtgagacccccaaaggctgccctgtgatgtccacacctgtcacagctcctagcaccccaagtgggagagccaccagtccaactcagagcacctcctcttggcagaaacccaggacaaccactttggtgacaattagcacaacctccactccacagaccagtacaatctctacccctacaaccagcatgacctctgcttctacacccagaacaatctctgctctgacaaccagcacaacctcagctcctacaactagcacatcctcggctcctacaaccagcacaacttctgcccctacaaccaacacaacctctgctcctacacccagaacaacctctgctccgacaaaaagcacaacctgcactcgaaagaccagcacaacctctgcccctacaaccagcaagacttctgcctctacaaccagcacgacctctgctcctatacccagagcaatctctgctcctacaaaaagtacaacctacactcggaagaccagcacaacctctacccctaaaaccagcacgacctctgctcctacacccagaacatctgctcctacaaaaagcacaacctgcactcgaaagaccagcacaacctctacccctaaaaccagcacgacctctgctcctacaaccagcatgacctctgctcatacacccagaacatctgctcctacaaaaagcaccaagtgcattcgaaagaccagaacaacctctgcccctataaccagcacgacttctgctcctacaaccagcacgacctctgctcctccacccacaacaacctctgctcctacaaaaagcacaactttcactcgacagactacaacaacctctgctcctacaactagcacaacctctgcccctacaaccagcacaatctcaactcctataaccagcacaacttctgcctctacaaccagcacaaccattggtcctggaaatactcccacccctgttcttaccaccagcacaatctctgctcctacaaccagcaccagctctgttcctacaggcagcacaacctctggtcctgcaactattcccagccctgttcccaccaccagcacaactactgctcctacaaccagaacaacctctgcccttacaagcagcacaacttctggtcctgaaactgctcccagccctgttcctactaccagcacaacctctgcttctacaaccagcacaacctctggtcctggaactactcccagcccagttccaaccaccagcacaacctctgctcctacaaccagcaccagctctgctcctacaaccagcaccagttctgctcctacaaccagcacaacctctagtcctggaactactctcagccctgttcccacaatcagcacaacctctgctcctacaaccagaacaacctctgcccctacaagcagcacaacctctgccgctacaaccagcatagcctctggtcctgagactactgccagccctgttcctaccaccagcacaacctctgctcctacaaccagcacaacctctagtcctggaactactctcagccctgttctcaccaccagcataacctctggtcctacaaccagaaaaacctctgcttctacaaccagcacaacctctggtgctggaactccttccagccctgttcctaccaccagcacaacctctgctcctacaaccagcaccagctctgctcctagaagcagcacaacctctggtcctgcaactattcccagccctgttcccaccatcagcacaactactgctcctacaaccagaacaacctctgcccttacaagcagcacaacctctgccgctataaccagcacaacctctgcttctacaaccagcacaacctctggtcctgaaactactcacagccctattcctaccaccagcacaacctctacttctacaaccagcacaacctctagtcctggaactactcccagccctgttcccaccaccagcaccacgagctctgctcctacaaccagcaccagttctgctcctacaaccacaacctctagtcctggaactactccaagccctgttcccaccaccagcacaaactctgctcctacaaccagaaaaacctctgcttctacaattagcacaacctctgctgctacaaccagcacaacctctggtcctgaaactactcccagccctgttcctaccaccagcacaacctctgctcctacaaccagcaaaacctctgcttctacaaccagcacaacctctagtcctggaactactcccagcccagttcctaccaccagcacaacctctgctcctacaaccagcaccagctctgctcctacaaccagcaccagttctgctcctacaaccagcacaacctctagtcctaccaccagcacaacctctgctcctacaaccagcacaacctctagtcctggaagtactcccagccctgttcccaccatcagcacaacctctgctcctacaaccagaaaaacctctgcttctacaaccagcacaacctctggtgctggaactcctcccagccctgttcctaccaccagcacaacctctgctcctacaaccagcaccagctctgctcctacaaccagcacaacctctattcctggaactcctcccagccctgttcctaccactagcacaacctctgctcctacaaccagcaccacctctgctcctacaaccagcacaacctctattcctggaactactcccagccctgttcctaccactagcacaatctctgctcctacaaccagcaccagctctgctcctacaaccagcacaacctccagtcctggaactactcccagccctgttcccaccaccagcacaacttctgttcctacaaccagcacaacctctgcccctacaagcagcacaacctctgccactataaccagcacaacctctggtcctgaaaatactcccagccctattcctacaacaagcacaacctccgcttctacaaccagtacaacctctggtcctgaaactactcacagccctattcctaccaccagcacaacctctgctactacaaccagcacaacctctagtcctggaactactcccagccctgttcccaccaccaccaccaccagctctgttcctacaatcagcaccaccagctctgctcctacaaccagcaccagttctgctcctacaaccagcacaacctctagtcctggaactactcccagccctcttcccaccaccagcataacctctgtgcctacaaccagaacaacctctacccctacaagcagcacaacctctgccgctataaccagcacaacctctggtcctgaaactactcccagccctgttcctaccaccagcacaacctctgcttctacaaccagcacaacctctggtcctggaactactcccagccctgttcctaccaccagcaccatcagctctgctcctacaaccagcaccaccagctctgctcctacaaccagcaccagttctgctcctacaaccagcacaacctctagtcctggcactattcccagccctgttcccaccaccagcgcaacctctgctcctacaaccagaacaacctctgcttctacaactagcacaacctctggtgctggaactactcccagccctgttcctaccaccagtgcaacctctgcccctacaagcagcacaacccccggtcctggaactactcccagccctgttcccaccaccagcacaacttctgctcctacaaccagaacaacttctgcccctacaagcagcacaacctctgtcgctataaccagcacaacctcgggtcctgaaactactcccagccctgttcctacctccagcacaacctctgctcctacaaccagcaccaccagctctgctcctacaaccagcactagttctgctcctacaaccagcacaacctctagtcctggaactactcccagccttgttcccaccaccagcacaacttctgctcctacaaccagaacaacctctgcccctacaagtagcacaacatctgccgctacaaccagcacaacctctggtcctgaaactactcccagccctgttcttaccaccagcacaacctctgcttctacaactagcacaacctcgggtcccggaaatacttccagcccagttcctaccaccagaacaacctctgctcctagaaccagcaccagctcacctcctacaactagcaccagttctgctcctacaaccagcagaacctctattcctagaagtactcccagccctgttcccaccaccagcacaacctctgctcctacaagcagagcaacctctgcccctacaagcagcacaacatctactgctacaaccagcacaacctctggtcctgaaacgactcccagccctgttcctaccttcagcaaaacctctgcttctacaaccagcacaacctctggtcctggaactactcccagcccagttcctaccaccagcacaacctctgctcctacaaccagcaccagctctgctcctacgaccagcacaacctccagtcctggaactattcccagccctgttcccaccaccagcacaatctctgctcctacaaccagcaccagctctgctcctatgaccagcacaacctccagtcctggaactattcccagccctgttcccaccaccagcatgacctctgctcctactaccagcacaacccctgcttctacaaccagcacaacctctggtcctggaactaccccaagccctgttcctaccaccaacaaaacctctgctcctccaaccagcacaacctctgctactacaaccagcacaatctctgcccctagagtcagaacaatctcacctcgtacaaccagtacaacttctggtcctggaactacccaaagccctgttcccaccaccagcacaatctctgcccctacaaccagaacaacctctgcccctacaagcagcacaacctcagctgctgcaaccagcacaacttctgctcctgaaactactcccagccctgttcctaccaccagcacaacctctgctcctacaaccagcaaaacctctgcttctacaaccagcagaacctttggtcctggaactactcccagccctgtgcctaccagcagcacaacctctgcttctactaccagcacatcctctggtcctgaaactactcccagccctcttcctaccaccagcacaacttctgcttctaccagcagcacaacctctggtcctggaacgactcccagccctgttcccaccaccagcacaaactctgctcctacaaccagcacaacctctgccactaaaaccagcacaacctctggtcctggaacgactcccagccctgttcccaccaccagcatgacctctgctcctacaaccagcacaacctctgctattacaactagcccaacctcttcccgtacaagcagcacaacctccactccacagaccagcataatctctgttcctacaaccagcacaagttctggtcctggaagtacccaaagctctgttttcaccattagcacaacctctgcccctacaaccagcacaacctctgcccctacaagcagcaaaacctctgctgctacaaccagcacaacctctggtcctgaaactactcccagccctgttcctactaccagtacaacctctgcttctacaaccagcacaacctctggtcctggaactactcccagcccagttcctaccaccagcacaacctctgctcctccaaccagcacaacctccagtcctggaactattcccaaccctgttcccaccaccagcacaacctctgctcctaccaccagcacaacctctgctcctccaaccagcacaacctctgctcctccaaccagcacaatctctgctactacaaccagcacaatctctgcccctagagtcagaacaatctcacctcgtacaaccagtacaacccctgttcccaccaccagcacgacctctgttcctacaaccagcacaacctctgctattacaactagcccaacctctgcccctacaagcagcacaacctccactccacagaccagcataatctctgttcctacaaccagcacaagttctggtcctggaagtacccaaagctctgtttttaccattagcacaacttctgcccctacaaccagcacaacctctgcccctacaagcagcaaaacctctgctgctacaaccagcacaacctctggtcctgaaactactcccagccctgttcctactaccagtacaacctctgcttctacaaccagcacaacctctggtcctggaactactcccagcccagttcttaccaccagcacaacctctgctcctccaaccagcacaacctctgctcctccaaccagcacaacctctgctactgcaaccagcacaatctctgcccctagagtcagaacaatctcacctcgtacaaccagtacaacttctggtcctggaactacccaaagccctgttcccaccaccagcacaatctctgcccctacaaccagaacaacttctgcccctacaagcagcacaacctcagctgctgcaaccagcacaacctctgctcctgaaactactcccagccctgttcctactaccagtacaacctctgcttctacaaccagcacaacctctggtcctggaactactcccagcccagttcttaccaccagcacaacctctgctcctccaaccagcacaacctctgctcctccaaccagcacaacctctgctactgcaaccagcacaatctctgcccctagagtcagaacaatctcacctcgtacaaccagtacaacttctggtcctggaactacccaaagccctgttcccaccaccagcacaatctctgctcctacaaccagaacaacctctgcccctacaagcagcacaacctcagctgctgcaaccagcacaacctctactcctgaaactactcccagccctgttcccgccaccagcacaacctctgctcctacaaccagcaaaacgtctgcttctataaccagcagaacctttggtcctggaactactcccagccctgtgcctaccagcagcacaacctctgcttctactaccagcacatcctctggtcctgaaactactcccagccctcttcctaccaccagcacaacttctgcttctaccagcagcacaacctctggtcctggaacgactcccagccctgttcccaccaccagcacaaactctgctcctacaaccagcacaacctctgccactacaaacagcacaacctctggtcctggaacgactcccagccctgttcccaccaccagcatgacctctgctcctacaaccagcacaacctctgctattacaactagcccaacctctgcccttacaagcagcacaacctccactccacataccagcataacctctgttcctacaaccagcacaacttctggtcctggaagtacccaaagctctgttttcaccattagcacaacctctgcccctacaaccagcacaacctctgcccctacaagcagcaaaacctctgctgctacaaccagcacaacctctggtcctgaaactactcccagccctgttcctactaccagtacaacctctgcttctacaaccagcacaacctctggtcctacaaccagtacaacttctggtcctggaactacccaaagccctgttcccaccaccagcacaatctctgcccctacaaccagaacaacctctgcccctacaagcagcacaacctcagctgctgcaaccagcacaacctctgctcctgaaactactcccagccctgttcctactaccagtacaacctctgcttctacaaccagcacaacctctggtcctggaactactcccagcccagttcttaccaccagcacaacctctgctcctacaaccagtacaacttctggtcctggaactacccaaagccctgttcccaccaccagcacaatctctgcccctacaaccagaacaacctctgcccctacaagcagcacaacctcagctgctgcaaccagcacaacctctgctcctgaaactactcccagccctgttcccaccaccagcacaacctctgctcctacaaccagcaaaacctctgcttctacaaccagcagaacctttggtcctggaactactcccagccctgtgcctaccaccagcacaacctctgcttctactaccagcacatcctctggtcctgaaactactcccagccctcttcctaccaccagcacaacttctgcttctaccagcagcacaacctctggtcctggaacgactcccagccctgttcccaccaccagcacaaactctgctcctacaaccagcacaacctctgccactacaaccagcacaacctctggtcctggaacgactcccagccctgttcccaccaccagcacgacctctgctcctacaaccagcacaacctctgctgctacaaccagcacaacctctggtcctgaaactactcccagccctgttcctactaccagtactacctctgcttctacaaccagcacaacctctggtcctggaactactcccagccctgttcctaccaccagcactatctctgctcctacaaccagcacaacctcaggtcctggaactattcccagccctgttcccaccaccagcacaacctctgtttcaaagaccagcacaagccatatttctgtatccaagacaacccaccctcaaccagttaccagtgactgtcatccccagtgcacctggaccaagtggttcgacgtggacttcccgtcccctggaccccacggcggagatgaggaaacctacaacaacatcatcaggagtggggaaaaaatctgccgccaacctgaggagatcaccaggctccagtgccgagccgcgagccacccggaggtgagcatcgaacacctgggccaggtggtgcagtgcagccgcgaagagggcctggtgtgccggaaccaggaccagcagggacccttcaagatgtgcctcaactacgaggtgcgcgtgctctgctgcgagatccccaaaggctgcccagtgactgctgtgaccccatatgggacttctaccaataccctgtatccttccctgtctacctccgtggcatccacctctgtggcatccagctccgtggcatccagctctgtggcctccagctctgtggcttactccaccccaacctgcttctgcaacgtaactggccggctctaccccatgggatccaccatataccgccacagagaccttgccggccactgctattatgccctgtgcagccaggactgccaagtggtcagaggagttggcagtgactgtccatccaccacgctgcctcctgccccagccacgtccccttggacatccacctctgagcccgtcactgagctgggatgcccaaatgcagttccccccagaaagaaaggtgagacctgggccacgcccaactgctccgaggccacctgtgagggcaacaacatcatctccctgcgcccgcgaacgtgcccgagggtggagaaacccacctgtgccaatggctacccggccctgaaggtggccgaccaggacggctgctgctatcactaccagtgccagtgtgtgtgcagcggctggggtgatccccactacatcacctttgacggcacctactacaccttcctggacaactgcacgtacgtgctggtgcagcagatcgtgcccgtgtacggccacttccgcgtgctggtggacaacgacttctgtggcgcggaggatgggctttcctgcccgaagtccatcatcctggagtaccagcaggaccgcgtggtgctgacccgcaagtcagtccacggggcgatgaccaatgagatcatcttcaacaacaaggtagtcagccccggcttccggaaaaacggcatcgtggtctcgcgcatcggcatcaagatgtacgcgaccatcccggcactgggcgtccaggtcatgttctccggcctcatcttctcggtggaggtgcccttcagcaagtttgccaacaacaccgagggccagtgcggcacttgcaccaacgacctgaaggatgagtgccgcacgcctgggggcacggtggtcgcttcctgctctgagatgtctggcctctggaacgtcagcatccccaaccagccagcctgccacgggcctcgcccgctgcccaccacggtcgggcccacgacagttgggtccaccacgttcgggcctaccaccccgcctgctccgtgcccgccatcgtccatctgccggctgattctgagcaaggtctttgagccgtgccacgccgtgatccccccactgccattctatgagggctgcactttcgaccagtgccacaagaccgacctggacacggtgtgctccagcctggagctgtacgcggcgctctgcgcatcccaagacatctgcatcgactggagaggccggaccaaccacatgtgccaattcacctgcccagccgacaaggtgtaccagccgtgcggcccgagcaacccctcctactgctacggcaacgacagcgccagcctcggggccctgccggaggccggccccatcaccgaaggctgcttctgtccggagggcatgaccctcttcagcaccagcgcccaagtctgcgtgcccacgggctgccccaggtgtctggggccccacggagagccggtgaaggtgggccacaccgtcggcagggactgccaggagtgcacgtgtgaggcggccacgtggacgctgagctgccaacccaagctctgcccgctgccccctgcctgccccctgcccggcttcgtgcctgtgcctgcagccccacaggccggccagtgctgcccccagtacaactgcgcctgcaacaccagccactgccctgcacccgtggactgtcccgagggtgcccgtgcgatcccgacctacgaggagggggactgctgcccggtccaaaagtgcaactggacagagtgcagcatcaacgggaccttgtaccagcccggcgccgtggtctcctccagcctgtgcgaaacctgcaggtgtgagctgcctggcggccccctgtcggacacgtttgtggtcagttgtgagacccagatctgcaactcacactgccctgtgggctttgagtaccaggagcagagcgggcagtgctgtggcacttgtgtgcaggtcgcctgtgtcaccaacaccagcgggagctccgcccacctcttctaccccggcgagacctggtcagaccccgggaaccactgtgtcacctatgagtgtgagaagcacttggacgggctcgtggtggtcaccacgaagaaggcgtgccccccgctcagctgttctctggacgaggcccgcatgagcaaggacggctgctgtcgcttctgcccgccgcccccgctcccaccccagtaccagaaccagtcgacctgtgctgtgtaccataggagccagatcatccagcagcagggctgcaactcctcggagcccgtgcgcctggcttactgccgggggaactgtggggacagctcttccatgtactcgttcgagggcaacatggtggagcacaggtgccagtgctgccaggagctgcggacctcgctgaggaatgtgaccctgcactgcgccgacggctccagccggaccttcagcttcaccgaggtggaacagtgcggctgcatgggccggcggtgccccgcgccgggcgacacccagcactcggaggagatgggacccgaccagagccaggaggcggggagtgggagctgggagagaggcacccgggtgtcccccgtccactgaccagcaccgccgccctcctgacccccaaggagaacctcccatatgtcctccgagttcggcttccaaggccagtggaacttgtgccctcatccaggcggcaacagctttgaacacactgtccacgcccgctttcttgtggagggtgtgggctgtgggtcacccactgcctggaggaggggcccttacccgccccgcctgcagccacctctcaggaccagcccagggccggtggggctcctctggccatgtgtccagtctgctgttctcgggacttgagtatcacctgagggtctcagcaatgatgcttggatgtggtgataggctgcccagtggctgcaggaggaaaagcctcactcctacctcagccctcagcctgcactcccctcctcaggacatggccaatctgttgcataaatacacttgagcattttgcaa

SEQ ID NO: 444 - RNA, 17712 nt, Macaca mulatta
  source 1..17712: mol_type = mRNA
ttgcaaaatgctcaagtgtatttatgcaacagattggccatgtcctgaggaggggagtgcaggctgagggctgaggtaggagtgaggcttttcctcctgcagccactgggcagcctatcaccacatccaagcatcattgctgagaccctcaggtgatactcaagtcccgagaacagcagactggacacatggccagaggagccccaccggccctgggctggtcctgagaggtggctgcaggcggggcgggtaagggcccctcctccaggcagtgggtgacccacagcccacaccctccacaagaaagcgggcgtggacagtgtgttcaaagctgttgccgcctggatgagggcacaagttccactggccttggaagccgaactcggaggacatatgggaggttctccttgggggtcaggagggcggcggtgctggtcagtggacgggggacacccgggtgcctctctcccagctcccactccccgcctcctggctctggtcgggtcccatctcctccgagtgctgggtgtcgcccggcgcggggcaccgccggcccatgcagccgcactgttccacctcggtgaagctgaaggtccggctggagccgtcggcgcagtgcagggtcacattcctcagcgaggtccgcagctcctggcagcactggcacctgtgctccaccatgttgccctcgaacgagtacatggaagagctgtccccacagttcccccggcagtaagccaggcgcacgggctccgaggagttgcagccctgctgctggatgatctggctcctatggtacacagcacaggtcgactggttctggtactggggtgggagcgggggcggcgggcagaagcgacagcagccgtccttgctcatgcgggcctcgtccagagaacagctgagcggggggcacgccttcttcgtggtgaccaccacgagcccgtccaagtgcttctcacactcataggtgacacagtggttcccggggtctgaccaggtctcgccggggtagaagaggtgggcggagctcccgctggtgttggtgacacaggcgacctgcacacaagtgccacagcactgcccgctctgctcctggtactcaaagcccacagggcagtgtgagttgcagatctgggtctcacaactgaccacaaacgtgtccgacagggggccgccaggcagctcacacctgcaggtttcgcacaggctggaggagaccacggcgccgggctggtacaaggtcccgttgatgctgcactctgtccagttgcacttttggaccgggcagcagtccccctcctcgtaggtcgggatcgcacgggcaccctcgggacagtccacgggtgcagggcagtggctggtgttgcaggcgcagttgtactgggggcagcactggccggcctgtggggctgcaggcacaggcacgaagccgggcagggggcaggcagggggcagcgggcagagcttgggttggcagctcagcgtccacgtggccgcctcacacgtgcactcctggcagtccctgccgacggtgtggcccaccttcaccggctctccgtggggccccagacacctggggcagcccgtgggcacgcagacttgggcgctggtgctgaagagggtcatgccctccggacagaagcagccttcggtgatggggccggcctccggcagggccccgaggctggcgctgtcgttgccgtagcagtaggaggggttgctcgggccgcacggctggtacaccttgtcggctgggcaggtgaattggcacatgtggttggtccggcctctccagtcgatgcagatgtcttgggatgcgcagagcgccgcgtacagctccaggctggagcacaccgtgtccaggtcggtcttgtggcactggtcgaaagtgcagccctcatagaatggcagtggggggatcacggcgtggcacggctcaaagaccttgctcagaatcagccggcagatggacgatggcgggcacggagcaggcggggtggtaggcccgaacgtggtggacccaactgtcgtgggcccgaccgtggtgggcagcgggcgaggcccgtggcaggctggctggttggggatgctgacgttccagaggccagacatctcagagcaggaagcgaccaccgtgcccccaggcgtgcggcactcatccttcaggtcgttggtgcaagtgccgcactggccctcggtgttgttggcaaacttgctgaagggcacctccaccgagaagatgaggccggagaacatgacctggacgcccagtgccgggatggtcgcgtacatcttgatgccgatgcgcgagaccacgatgccgtttttccggaagccggggctgactaccttgttgttgaagatgatctcattggtcatcgccccgtggactgacttgcgggtcagcaccacgcggtcctgctggtactccaggatgatggacttcgggcaggaaagcccatcctccgcgccacagaagtcgttgtccaccagcacgcggaagtggccgtacacgggcacgatctgctgcaccagcacgtacgtgcagttgtccaggaaggtgtagtaggtgccgtcaaaggtgatgtagtggggatcaccccagccgctgcacacacactggcactggtagtgatagcagcagccgtcctggtcggccaccttcagggccgggtagccattggcacaggtgggtttctccaccctcgggcacgttcgcgggcgcagggagatgatgttgttgccctcacaggtggcctcggagcagttgggcgtggcccaggtctcacctttctttctggggggaactgcatttgggcatcccagctcagtgacgggctcagaggtggatgtccaaggggacgtggctggggcaggaggcagcgtggtggatggacagtcactgccaactcctctgaccacttggcagtcctggctgcacagggcataatagcagtggccggcaaggtctctgtggcggtatatggtggatcccatggggtagagccggccagttacgttgcagaagcaggttggggtggagtaagccacagagctggaggccacagagctggatgccacggagctggatgccacagaggtggatgccacggaggtagacagggaaggatacagggtattggtagaagtcccatatggggtcacagcagtcactgggcagcctttggggatctcgcagcagagcacgcgcacctcgtagttgaggcacatcttgaagggtccctgctggtcctggttccggcacaccaggccctcttcgcggctgcactgcaccacctggcccaggtgttcgatgctcacctccgggtggctcgcggctcggcactggagcctggtgatctcctcaggttggcggcagattttttccccactcctgatgatgttgttgtaggtttcctcatctccgccgtggggtccaggggacgggaagtccacgtcgaaccacttggtccaggtgcactggggatgacagtcactggtaactggttgagggtgggttgtcttggatacagaaatatggcttgtgctggtctttgaaacagaggttgtgctggtggtgggaacagggctgggaatagttccaggacctgaggttgtgctggttgtaggagcagagatagtgctggtggtaggaacagggctgggagtagttccaggaccagaggttgtgctggttgtagaagcagaggtagtactggtagtaggaacagggctgggagtagtttcaggaccagaggttgtgctggttgtagcagcagaggttgtgctggttgtaggagcagaggtcgtgctggtggtgggaacagggctgggagtcgttccaggaccagaggttgtgctggttgtagtggcagaggttgtgctggttgtaggagcagagtttgtgctggtggtgggaacagggctgggagtcgttccaggaccagaggttgtgctgctggtagaagcagaagttgtgctggtggtaggaagagggctgggagtagtttcaggaccagaggatgtgctggtagtagaagcagaggttgtgctggtggtaggcacagggctgggagtagttccaggaccaaaggttctgctggttgtagaagcagaggttttgctggttgtaggagcagaggttgtgctggtggtgggaacagggctgggagtagtttcaggagcagaggttgtgctggttgcagcagctgaggttgtgctgcttgtaggggcagaggttgttctggttgtaggggcagagattgtgctggtggtgggaacagggctttgggtagttccaggaccagaagttgtactggttgtaggagcagaggttgtgctggtggtaagaactgggctgggagtagttccaggaccagaggttgtgctggttgtagaagcagaggttgtactggtagtaggaacagggctgggagtagtttcaggagcagaggttgtgctggttgcagcagctgaggttgtgctgcttgtaggggcagaggttgttctggttgtaggggcagagattgtgctggtggtgggaacagggctttgggtagttccaggaccagaagttgtactggttgtaggaccagaggttgtgctggttgtagaagcagaggttgtactggtagtaggaacagggctgggagtagtttcaggaccagaggttgtgctggttgtagcagcagaggttttgctgcttgtaggggcagaggttgtgctggttgtaggggcagaggttgtgctaatggtgaaaacagagctttgggtacttccaggaccagaagttgtgctggttgtaggaacagaggttatgctggtatgtggagtggaggttgtgctgcttgtaagggcagaggttgggctagttgtaatagcagaggttgtgctggttgtaggagcagaggtcatgctggtggtgggaacagggctgggagtcgttccaggaccagaggttgtgctgtttgtagtggcagaggttgtgctggttgtaggagcagagtttgtgctggtggtgggaacagggctgggagtcgttccaggaccagaggttgtgctgctggtagaagcagaagttgtgctggtggtaggaagagggctgggagtagtttcaggaccagaggatgtgctggtagtagaagcagaggttgtgctgctggtaggcacagggctgggagtagttccaggaccaaaggttctgctggttatagaagcagacgttttgctggttgtaggagcagaggttgtgctggtggcgggaacagggctgggagtagtttcaggagtagaggttgtgctggttgcagcagctgaggttgtgctgcttgtaggggcagaggttgttctggttgtaggagcagagattgtgctggtggtgggaacagggctttgggtagttccaggaccagaagttgtactggttgtacgaggtgagattgttctgactctaggggcagagattgtgctggttgcagtagcagaggttgtgctggttggaggagcagaggttgtgctggttggaggagcagaggttgtgctggtggtaagaactgggctgggagtagttccaggaccagaggttgtgctggttgtagaagcagaggttgtactggtagtaggaacagggctgggagtagtttcaggagcagaggttgtgctggttgcagcagctgaggttgtgctgcttgtaggggcagaagttgttctggttgtaggggcagagattgtgctggtggtgggaacagggctttgggtagttccaggaccagaagttgtactggttgtacgaggtgagattgttctgactctaggggcagagattgtgctggttgcagtagcagaggttgtgctggttggaggagcagaggttgtgctggttggaggagcagaggttgtgctggtggtaagaactgggctgggagtagttccaggaccagaggttgtgctggttgtagaagcagaggttgtactggtagtaggaacagggctgggagtagtttcaggaccagaggttgtgctggttgtagcagcagaggttttgctgcttgtaggggcagaggttgtgctggttgtaggggcagaagttgtgctaatggtaaaaacagagctttgggtacttccaggaccagaacttgtgctggttgtaggaacagagattatgctggtctgtggagtggaggttgtgctgcttgtaggggcagaggttgggctagttgtaatagcagaggttgtgctggttgtaggaacagaggtcgtgctggtggtgggaacaggggttgtactggttgtacgaggtgagattgttctgactctaggggcagagattgtgctggttgtagtagcagagattgtgctggttggaggagcagaggttgtgctggttggaggagcagaggttgtgctggtggtaggagcagaggttgtgctggtggtgggaacagggttgggaatagttccaggactggaggttgtgctggttggaggagcagaggttgtgctggtggtaggaactgggctgggagtagttccaggaccagaggttgtgctggttgtagaagcagaggttgtactggtagtaggaacagggctgggagtagtttcaggaccagaggttgtgctggttgtagcagcagaggttttgctgcttgtaggggcagaggttgtgctggttgtaggggcagaggttgtgctaatggtgaaaacagagctttgggtacttccaggaccagaacttgtgctggttgtaggaacagagattatgctggtctgtggagtggaggttgtgctgcttgtacgggaagaggttgggctagttgtaatagcagaggttgtgctggttgtaggagcagaggtcatgctggtggtgggaacagggctgggagtcgttccaggaccagaggttgtgctggttttagtggcagaggttgtgctggttgtaggagcagagtttgtgctggtggtgggaacagggctgggagtcgttccaggaccagaggttgtgctgctggtagaagcagaagttgtgctggtggtaggaagagggctgggagtagtttcaggaccagaggatgtgctggtagtagaagcagaggttgtgctgctggtaggcacagggctgggagtagttccaggaccaaaggttctgctggttgtagaagcagaggttttgctggttgtaggagcagaggttgtgctggtggtaggaacagggctgggagtagtttcaggagcagaagttgtgctggttgcagcagctgaggttgtgctgcttgtaggggcagaggttgttctggttgtaggggcagagattgtgctggtggtgggaacagggctttgggtagttccaggaccagaagttgtactggttgtacgaggtgagattgttctgactctaggggcagagattgtgctggttgtagtagcagaggttgtgctggttggaggagcagaggttttgttggtggtaggaacagggcttggggtagttccaggaccagaggttgtgctggttgtagaagcaggggttgtgctggtagtaggagcagaggtcatgctggtggtgggaacagggctgggaatagttccaggactggaggttgtgctggtcataggagcagagctggtgctggttgtaggagcagagattgtgctggtggtgggaacagggctgggaatagttccaggactggaggttgtgctggtcgtaggagcagagctggtgctggttgtaggagcagaggttgtgctggtggtaggaactgggctgggagtagttccaggaccagaggttgtgctggttgtagaagcagaggttttgctgaaggtaggaacagggctgggagtcgtttcaggaccagaggttgtgctggttgtagcagtagatgttgtgctgcttgtaggggcagaggttgctctgcttgtaggagcagaggttgtgctggtggtgggaacagggctgggagtacttctaggaatagaggttctgctggttgtaggagcagaactggtgctagttgtaggaggtgagctggtgctggttctaggagcagaggttgttctggtggtaggaactgggctggaagtatttccgggacccgaggttgtgctagttgtagaagcagaggttgtgctggtggtaagaacagggctgggagtagtttcaggaccagaggttgtgctggttgtagcggcagatgttgtgctacttgtaggggcagaggttgttctggttgtaggagcagaagttgtgctggtggtgggaacaaggctgggagtagttccaggactagaggttgtgctggttgtaggagcagaactagtgctggttgtaggagcagagctggtggtgctggttgtaggagcagaggttgtgctggaggtaggaacagggctgggagtagtttcaggacccgaggttgtgctggttatagcgacagaggttgtgctgcttgtaggggcagaagttgttctggttgtaggagcagaagttgtgctggtggtgggaacagggctgggagtagttccaggaccgggggttgtgctgcttgtaggggcagaggttgcactggtggtaggaacagggctgggagtagttccagcaccagaggttgtgctagttgtagaagcagaggttgttctggttgtaggagcagaggttgcgctggtggtgggaacagggctgggaatagtgccaggactagaggttgtgctggttgtaggagcagaactggtgctggttgtaggagcagagctggtggtgctggttgtaggagcagagctgatggtgctggtggtaggaacagggctgggagtagttccaggaccagaggttgtgctggttgtagaagcagaggttgtgctggtggtaggaacagggctgggagtagtttcaggaccagaggttgtgctggttatagcggcagaggttgtgctgcttgtaggggtagaggttgttctggttgtaggcacagaggttatgctggtggtgggaagagggctgggagtagttccaggactagaggttgtgctggttgtaggagcagaactggtgctggttgtaggagcagagctggtggtgctgattgtaggaacagagctggtggtggtggtggtgggaacagggctgggagtagttccaggactagaggttgtgctggttgtagtagcagaggttgtgctggtggtaggaatagggctgtgagtagtttcaggaccagaggttgtactggttgtagaagcggaggttgtgcttgttgtaggaatagggctgggagtattttcaggaccagaggttgtgctggttatagtggcagaggttgtgctgcttgtaggggcagaggttgtgctggttgtaggaacagaagttgtgctggtggtgggaacagggctgggagtagttccaggactggaggttgtgctggttgtaggagcagagctggtgctggttgtaggagcagagattgtgctagtggtaggaacagggctgggagtagttccaggaatagaggttgtgctggttgtaggagcagaggtggtgctggttgtaggagcagaggttgtgctagtggtaggaacagggctgggaggagttccaggaatagaggttgtgctggttgtaggagcagagctggtgctggttgtaggagcagaggttgtgctggtggtaggaacagggctgggaggagttccagcaccagaggttgtgctggttgtagaagcagaggtttttctggttgtaggagcagaggttgtgctgatggtgggaacagggctgggagtacttccaggactagaggttgtgctggttgtaggagcagaggttgtgctggtggtaggactagaggttgtgctggttgtaggagcagaactggtgctggttgtaggagcagagctggtgctggttgtaggagcagaggttgtgctggtggtaggaactgggctgggagtagttccaggactagaggttgtgctggttgtagaagcagaggttttgctggttgtaggagcagaggttgtgctggtggtaggaacagggctgggagtagtttcaggaccagaggttgtgctggttgtagcagcagaggttgtgctaattgtagaagcagaggtttttctggttgtaggagcagagtttgtgctggtggtgggaacagggcttggagtagttccaggactagaggttgtggttgtaggagcagaactggtgctggttgtaggagcagagctcgtggtgctggtggtgggaacagggctgggagtagttccaggactagaggttgtgctggttgtagaagtagaggttgtgctggtggtaggaatagggctgtgagtagtttcaggaccagaggttgtgctggttgtagaagcagaggttgtgctggttatagcggcagaggttgtgctgcttgtaagggcagaggttgttctggttgtaggagcagtagttgtgctgatggtgggaacagggctgggaatagttgcaggaccagaggttgtgctgcttctaggagcagagctggtgctggttgtaggagcagaggttgtgctggtggtaggaacagggctggaaggagttccagcaccagaggttgtgctggttgtagaagcagaggtttttctggttgtaggaccagaggttatgctggtggtgagaacagggctgagagtagttccaggactagaggttgtgctggttgtaggagcagaggttgtgctggtggtaggaacagggctggcagtagtctcaggaccagaggctatgctggttgtagcggcagaggttgtgctgcttgtaggggcagaggttgttctggttgtaggagcagaggttgtgctgattgtgggaacagggctgagagtagttccaggactagaggttgtgctggttgtaggagcagaactggtgctggttgtaggagcagagctggtgctggttgtaggagcagaggttgtgctggtggttggaactgggctgggagtagttccaggaccagaggttgtgctggttgtagaagcagaggttgtgctggtagtaggaacagggctgggagcagtttcaggaccagaagttgtgctgcttgtaagggcagaggttgttctggttgtaggagcagtagttgtgctggtggtgggaacagggctgggaatagttgcaggaccagaggttgtgctgcctgtaggaacagagctggtgctggttgtaggagcagagattgtgctggtggtaagaacaggggtgggagtatttccaggaccaatggttgtgctggttgtagaggcagaagttgtgctggttataggagttgagattgtgctggttgtaggggcagaggttgtgctagttgtaggagcagaggttgttgtagtctgtcgagtgaaagttgtgctttttgtaggagcagaggttgttgtgggtggaggagcagaggtcgtgctggttgtaggagcagaagtcgtgctggttataggggcagaggttgttctggtctttcgaatgcacttggtgctttttgtaggagcagatgttctgggtgtatgagcagaggtcatgctggttgtaggagcagaggtcgtgctggttttaggggtagaggttgtgctggtctttcgagtgcaggttgtgctttttgtaggagcagatgttctgggtgtaggagcagaggtcgtgctggttttaggggtagaggttgtgctggtcttccgagtgtaggttgtactttttgtaggagcagagattgctctgggtataggagcagaggtcgtgctggttgtagaggcagaagtcttgctggttgtaggggcagaggttgtgctggtctttcgagtgcaggttgtgctttttgtcggagcagaggttgttctgggtgtaggagcagaggttgtgttggttgtaggggcagaagttgtgctggttgtaggagccgaggatgtgctagttgtaggagctgaggttgtgctggttgtcagagcagagattgttctgggtgtagaagcagaggtcatgctggttgtaggggtagagattgtactggtctgtggagtggaggttgtgctaattgtcaccaaagtggttgtcctgggtttctgccaagaggaggtgctctgagttggactggtggctctcccacttggggtgctaggagctgtgacaggtgtggacatcacagggcagcctttgggggtctcacagcagagcacgcgcacctcgtagttgaggcacatcttgaagggtccctgctggtcctggttccggcacaccaggccctcttcgcggctgcactgcaccacctggcccaggtgttcgatgctcacctccgggtggcttgtggctcggcactggagcctggtgatctcctcaggttggcggcagattttttccccacttctgatgatgttgttgtaggtttcctcatctccgccgtggggtccaggggacgggaagtccacgtcgaaccacttggtccaggtgcactggggatgacaatctctggtgaccgatctgttgtgggtgtcctgtgtgacgctggttgctgtggacccgcccctggaggtggctgtgggttgctccgtggaggccgagggcacgtgtgtggtgaaggtggtctgggtctgagctccagccgggtgtggagtcggccgtgtcgttgtgatggtcttcagcgttccggtgccgtctctgcacttgttcaccgtcttgcaacactggatgcggatctcgtagttgtagcagatgggtgggagctgattcttgttcaggcaaatcaacccctccgtgcggctacagatgacgtcctgccccaggtctgccagcggcgtgttggggaagcccactgcccggcactccacgcttcgaggattttcacagaatttgtacccttcgtctctcaaattttgaaaagtgtcaaaatctccgccatttattccgggatcagggtagctgccgtcgatccactcggtccaggtgcaaagctcgtgtacacaggagggtgtgatggactcggtgtggctgggcttgctggagaccacagaggtccccggggccgtggtcgacacggacgatgttgatgttgctggcactggcggagggctgggagttgagaaagttcttttgacagatgtagcggtacctggggcaggtgttgtcctggatgtagagagagacacggggccaggtgtgctgctggggactgaggaggctgaggcccgggtttcagtggtcttggaggttgttggaggagtggtctgggttgaactgctagaggtggagcaggctaggggcgtgcaacacaggaccctgatctggtagttgtagcagagccccgatgcctgctccctgttacgacaggtcagccccatgtccgggctgcactgcacatgctgccccagggctcggagcggcactcggggggcgtcctcggctcggcactccaccgacctgggtgattcgcacaccaggtacccatgggcgcggaggttcttcagcgtgtcaaagtcaccgctgtccatgccctgtccagggcggctaacgtccatccaaggtgaccacaggcactcttccccacagaccggcggcagcgaggcagaggctgtgggcggcctcgtcctgggagaagtgcctgctgtggtgggccaggcgctgcttggagggcctgtgtgcgcgctgctcgggacagggctggaggcgtgcgtggagctcacgacgagtgggggcgtggagaaggagaaggtggttggggggacgggggtggtggggctgcaggggtagaccctcctctcaatggtgccgttggccccacagcgggcagagatgcagccacccgtgccgtccgtcgtgtggtagatgacgtcccctgggtggaagctctgtccgtcgtaggtgcagacacaggcctcagcttcgtaggtacactccacgccgcgctcagtgcataggcaggagtggcagttcttgtctgagggcaccactgcgcctggccggtaggacttcccgtggacgtggcacggtggtggcggaggtggggttgggcaggtggccacacactgcatcttgtcctcatcaaagatgggagcctctggtgggcacttggggtagcagccttccaggccccggacgtcctgcaggcactctccgcgcgggttccggcaggtccgcaggcagggcgccccgcagggctggtagtgccactcgcactggccttccgggttgtagtagtcacagaacagagggcagatgctcggggtccgccaggacacacacaggcccgcttcatggcaggcctgggcataggcggccacagccgtgcagaaacactcgcagtcaccccctgagtcgcaggcacatgcgtcgttcacacaggcctcgtagtacctggctggctccacgtgtgcgtggcaggcggcaaaggtggggccgtggaggatgctgcactgcctctgggcccaggacttgcggaaggggttggccgtgcaggggtccttggccaccagggcatccgggcaggacggggagagcttccagctgttcccgaactccagcacgtcccccaccacagactggctccgtgtggcaaagtcgttggcggcaatgtcgtcgaagttcccgcacaggccgcagaccctgctcttgaactcggggctaaggttgatgaagatgctggtcttcttgtcccacagcagaaccaggccgatgtcggtgtccaccaccaggtagatgcccatctgccggatggtgtatggcacctcctggctctcgttcgtcccagtcacctccaccttcccgtggctcagcttcagctcggagccccccaggaagatcttgatggccttggagcaggtggtccccgtggtgccgcaggggacgttctcagtgacaacacggaaggagtcctgcacgctgcctttcccgccacagtggttctgcaccagcatgtactcgcagtctccgttgaagctgtagctctgcccgtcgaaggtgaggtagtggccatccccgtacacagcacaggtggccaggcaggggtcatctgtacaccgccacatcctgctgtcacaagtgcaggtattgcagccaacccggatggtctggccggcccggtagctggcctcgttgtgcacgcaggggcagtcctccacagtgatgcagttgccctcgccgtctgccaccagcccatcggggcacacgcagccaggcacacactgggggctgtaacaggtcatgtccagggtgtggcagctcttctgacagccggcccccgtgtccccgggcgtggcattgcggcagtcgaagaacaccatgggcgcagcacacactggggtgggggcttggcctccgatgcagctcagcttcccatgcgtgcaggtgcagacagccccactgtcgtgcaccgactccccattggggatcacggagcccctgtgatagcagggacagttgctggcctgcacacacttgcccgtgtcgtccaggaaggtgccctcgggacagatgcagccatccacggggataaagccaacactgcaggtgatgtccccctcactcagagagcggcaggtgggctggcaggtgctgacatggtagtggtaggtcatcgacttggggcaagtggtcatgggcttcgtgcagacgccgttcctccagccactgagctgcacacccttggcggcacaggcatgcacataggaggacagcacggcgcacaggcagtcctcgctccgctcacagttgcaggtgtcaaacatgcagttcgagtagtaggtgtccggcttcacggcagcgtggcaccggctgaaggggccgttggcatcggtcagctgcgagcaccagtgctgagcatacttctcgttctccacactcagggagcaagggtcttcgaagctgttcctgatgttgggacaggcggcctgggtcttgaaggtgttgaagaaggccgcggccgtggcctccaccaccccactgagggtccggaagtcatcggcctggatgctgttgaagttcccacagagaccgcaggtctgccctcggagcttgggcgccagccgcacgaacagctgcatggtgggtaccagctgcaggtccagctgcaggcccaggctggtctgggcgatgacgaagaaggtcgaaggtctgaagatggtgacgttagctgcagagatgggcagctgggtgtatatctggttcaggaacacttccccgctggccttgatcaccaccaccgtctgcgccccgtccaggctcagtgtcacgctcttcaggcaggtctcgctgtccgtcagcccacacctgcgcagctcagccagtacagtgaaggcactgctgtcacagggcttggtcaacacatagctgcagtccccgtgcaccgtgtagtgcctctcgtcaaatgtcgagaagtgggcacctccaagcacagagcaggtacccgggcatggaacctcctggcagctccaccggcctccggagcaggtgcagttggtgcagtctgtggagtaggtggcccccggggcataggcagtgccgttgtagacgcaggcacactgtgacacagggacacagccggtctggccgacgtcatcgagcaccgtcccctcagggcaaaagcagccggccacacagtggtcctcgcaggcccgggagtgctcctggttggagcaggtgtctgtgcagggggagcggcactcgtggtactgcatgttgctggggcacgtctgggggcagaggtcagggccccgccagtcctggggctgccccccggcgtgggcgcactgccgggagtactccgcgagggtgtggcagacgcagctgagcaggtcggtgcccccgcagaagcagaggtcttgcctgcaggcctccaggtagctgccgacgtccaccagggccacacagctggagaaaagctgaccattcaggagctcctcgcagatgccagagccagtggagcagttcctcgggggttcagggacagggtcctcacactgctccgtggggtcgtccatcttctgcaggttcccaaactccatgggagtcagcttgatgttgtgggagaggagctcgctgaccacgggcatcccattgaagtctccacagagcccacaggtctcgttggcatatttggcgtccaactccagcagcaggctgtcatcgtggttccacatgaggacaaggcccagtctggcctccaccttggtgtagctgctgctctgctgaatgaagaccccagactggctgaagggcagcaggaccgggcggccgttgaccaggacagagccgttggtcagctggatgaccatgccatccaccttcatgaggaccctgctcagcgtgggggctgctgactcctggctgcggcgtagctggacgttgaagtcctcgtaggcggcgccgcaatgctcagagaacacatagttgcagaggccggggaagcggaagacgtcgccgtcgaaggtcttgtagtggaagttgccccaggtgctgcacacccgcccgttgtgtgccgggttggaggctcgtaccacggggatggtcctcagaggcgggaagagagtcaccccacggggcgggaccccaccaggtccctgggcgatgggagagagggcagggtggtgctcgtagctggattcggaggagccgtcctgggcatggcctgtgtgccgggtgcaggccagagcaagagccagggtccagagtggggccagcttcctctggccgacacccat

SEQ ID NO: 445 - RNA, 3963 nt, Homo sapiens
  source 1..3963: mol_type = mRNA
ggggcagccactgcttacactgaagagggaggacgggagaggagtgtgtgtgtgtgtgtgtgtgtgtgtgtgtatgtatgtgtgtgctttatcttatttttctttttggtggtggtggtggaaggggggaggtgctagcagggccagccttgaactcgctggacagagctacagacctatggggcctggaagtgcccgctgagaaagggagaagacagcagaggggttgccgaggcaacctccaagtcccagatcatgtctctgtggggtctggtctccaagatgcccccagaaaaagtgcagcggctctatgtcgactttccccaacacctgcggcatcttctgggtgactggctggagagccagccctgggagttcctggtcggctccgacgccttctgctgcaacttggctagtgccctactttcagacactgtccagcaccttcaggcctcggtgggagagcagggggaggggagcaccatcttgcaacacatcagcacccttgagagcatatatcagagggaccccctgaagctggtggccactttcagacaaatacttcaaggagagaaaaaagctgttatggaacagttccgccacttgccaatgcctttccactggaagcaggaagaactcaagtttaagacaggcttgcggaggctgcagcaccgagtaggggagatccaccttctccgagaagccctgcagaagggggctgaggctggccaagtgtctctgcacagcttgatagaaactcctgctaatgggactgggccaagtgaggccctggccatgctactgcaggagaccactggagagctagaggcagccaaagccctagtgctgaagaggatccagatttggaaacggcagcagcagctggcagggaatggcgcaccgtttgaggagagcctggccccactccaggagaggtgtgaaagcctggtggacatttattcccagctacagcaggaggtaggggcggctggtggggagcttgagcccaagacccgggcatcgctgactggccggctggatgaagtcctgagaaccctcgtcaccagttgcttcctggtggagaagcagcccccccaggtactgaagactcagaccaagttccaggctggagttcgattcctgttgggcttgaggttcctgggggccccagccaagcctccgctggtcagggccgacatggtgacagagaagcaggcgcgggagctgagtgtgcctcagggtcctggggctggagcagaaagcactggagaaatcatcaacaacactgtgcccttggagaacagcattcctgggaactgctgctctgccctgttcaagaacctgcttctcaagaagatcaagcggtgtgagcggaagggcactgagtctgtcacagaggagaagtgcgctgtgctcttctctgccagcttcacacttggccccggcaaactccccatccagctccaggccctgtctctgcccctggtggtcatcgtccatggcaaccaagacaacaatgccaaagccactatcctgtgggacaatgccttctctgagatggaccgcgtgccctttgtggtggctgagcgggtgccctgggagaagatgtgtgaaactctgaacctgaagttcatggctgaggtggggaccaaccgggggctgctcccagagcacttcctcttcctggcccagaagatcttcaatgacaacagcctcagtatggaggccttccagcaccgttctgtgtcctggtcgcagttcaacaaggagatcctgctgggccgtggcttcaccttttggcagtggtttgatggtgtcctggacctcaccaaacgctgtctccggagctactggtctgaccggctgatcattggcttcatcagcaaacagtacgttactagccttcttctcaatgagcccgacggaacctttctcctccgcttcagcgactcagagattgggggcatcaccattgcccatgtcatccggggccaggatggctctccacagatagagaacatccagccattctctgccaaagacctgtccattcgctcactgggggaccgaatccgggatcttgctcagctcaaaaatctctatcccaagaagcccaaggatgaggctttccggagccactacaagcctgaacagatgggtaaggatggcaggggttatgtcccagctaccatcaagatgaccgtggaaagggaccaaccacttcctaccccagagctccagatgcctaccatggtgccttcttatgaccttggaatggcccctgattcctccatgagcatgcagcttggcccagatatggtgccccaggtgtacccaccacactctcactccatccccccgtatcaaggcctctccccagaagaatcagtcaacgtgttgtcagccttccaggagcctcacctgcagatgccccccagcctgggccagatgagcctgccctttgaccagcctcacccccagggcctgctgccgtgccagcctcaggagcatgctgtgtccagccctgaccccctgctctgctcagatgtgaccatggtggaagacagctgcctgagccagccagtgacagcgtttcctcagggcacttggattggtgaagacatattccctcctctgctgcctcccactgaacaggacctcactaagcttctcctggaggggcaaggggagtcggggggagggtccttgggggcacagcccctcctgcagccctcccactatgggcaatctgggatctcaatgtcccacatggacctaagggccaaccccagttggtgatcccagctggagggagaacccaaagagacagctcttctactacccccacagacctgctctggacacttgctcatgccctgccaagcagcagatggggagggtgccctcctatccccacctactcctgggtcaggaggaaaagactaacaggagaatgcacagtgggtggagccaatccactccttcctttctatcattcccctgcccacctccttccagcactgactggaagggaagttcaggctctgagacacaccccaacatgcctgcacctgcagcgcgcacacgcacgcacacacacatacagagctctctgagggtgatggggctgagcaggaggggggctgggtaagagcacaggttagggcatggaaggcttctccgcccattctgacccagggcctaggacggataggcaggaacatacagacacatttacactagaggccagggatagaggatattgggtctcagccctaggggaatgggaagcagctcaagggaccctgggtgggagcataggaggggtctggacatgtggttactagtacaggttttgccctgattaaaaaatctcccaaagccccaaattcctgttagccaggtggaggcttctgatacgtgtatgagactatgcaaaagtacaagggctgagattcttcgtgtatagctgtgtgaacgtgtatgtacctaggatatgttaaatgtatagctggcaccttagttgcatgaccacatagaacatgtgtctatctgcttttgcctacgtgacaacacaaatttgggagggtgagacactgcacagaagacagcagcaagtgtgctggcctctctgacatatgctaacccccaaatactctgaatttggagtctgactgtgcccaagtgggtccaagtggctgtgacatctacgtatggctccacacctccaatgctgcctgggagccagggtgagagtctgggtccaggcctggccatgtggccctccagtgtatgagagggccctgcctgctgcatcttttctgttgccccatccaccgccagcttcccttcactcccctatcccattctccctctcaaggcaggggtcatagatcctaagccataaaataaattttattccaaaataacaaaataaataatctactgtacacaatctgaaaa

SEQ ID NO: 446 - RNA, 3963 nt, Homo sapiens
  source 1..3963: mol_type = mRNA
ttttcagattgtgtacagtagattatttattttgttattttggaataaaatttattttatggcttaggatctatgacccctgccttgagagggagaatgggataggggagtgaagggaagctggcggtggatggggcaacagaaaagatgcagcaggcagggccctctcatacactggagggccacatggccaggcctggacccagactctcaccctggctcccaggcagcattggaggtgtggagccatacgtagatgtcacagccacttggacccacttgggcacagtcagactccaaattcagagtatttgggggttagcatatgtcagagaggccagcacacttgctgctgtcttctgtgcagtgtctcaccctcccaaatttgtgttgtcacgtaggcaaaagcagatagacacatgttctatgtggtcatgcaactaaggtgccagctatacatttaacatatcctaggtacatacacgttcacacagctatacacgaagaatctcagcccttgtacttttgcatagtctcatacacgtatcagaagcctccacctggctaacaggaatttggggctttgggagattttttaatcagggcaaaacctgtactagtaaccacatgtccagacccctcctatgctcccacccagggtcccttgagctgcttcccattcccctagggctgagacccaatatcctctatccctggcctctagtgtaaatgtgtctgtatgttcctgcctatccgtcctaggccctgggtcagaatgggcggagaagccttccatgccctaacctgtgctcttacccagcccccctcctgctcagccccatcaccctcagagagctctgtatgtgtgtgtgcgtgcgtgtgcgcgctgcaggtgcaggcatgttggggtgtgtctcagagcctgaacttcccttccagtcagtgctggaaggaggtgggcaggggaatgatagaaaggaaggagtggattggctccacccactgtgcattctcctgttagtcttttcctcctgacccaggagtaggtggggataggagggcaccctccccatctgctgcttggcagggcatgagcaagtgtccagagcaggtctgtgggggtagtagaagagctgtctctttgggttctccctccagctgggatcaccaactggggttggcccttaggtccatgtgggacattgagatcccagattgcccatagtgggagggctgcaggaggggctgtgcccccaaggaccctccccccgactccccttgcccctccaggagaagcttagtgaggtcctgttcagtgggaggcagcagaggagggaatatgtcttcaccaatccaagtgccctgaggaaacgctgtcactggctggctcaggcagctgtcttccaccatggtcacatctgagcagagcagggggtcagggctggacacagcatgctcctgaggctggcacggcagcaggccctgggggtgaggctggtcaaagggcaggctcatctggcccaggctggggggcatctgcaggtgaggctcctggaaggctgacaacacgttgactgattcttctggggagaggccttgatacggggggatggagtgagagtgtggtgggtacacctggggcaccatatctgggccaagctgcatgctcatggaggaatcaggggccattccaaggtcataagaaggcaccatggtaggcatctggagctctggggtaggaagtggttggtccctttccacggtcatcttgatggtagctgggacataacccctgccatccttacccatctgttcaggcttgtagtggctccggaaagcctcatccttgggcttcttgggatagagatttttgagctgagcaagatcccggattcggtcccccagtgagcgaatggacaggtctttggcagagaatggctggatgttctctatctgtggagagccatcctggccccggatgacatgggcaatggtgatgcccccaatctctgagtcgctgaagcggaggagaaaggttccgtcgggctcattgagaagaaggctagtaacgtactgtttgctgatgaagccaatgatcagccggtcagaccagtagctccggagacagcgtttggtgaggtccaggacaccatcaaaccactgccaaaaggtgaagccacggcccagcaggatctccttgttgaactgcgaccaggacacagaacggtgctggaaggcctccatactgaggctgttgtcattgaagatcttctgggccaggaagaggaagtgctctgggagcagcccccggttggtccccacctcagccatgaacttcaggttcagagtttcacacatcttctcccagggcacccgctcagccaccacaaagggcacgcggtccatctcagagaaggcattgtcccacaggatagtggctttggcattgttgtcttggttgccatggacgatgaccaccaggggcagagacagggcctggagctggatggggagtttgccggggccaagtgtgaagctggcagagaagagcacagcgcacttctcctctgtgacagactcagtgcccttccgctcacaccgcttgatcttcttgagaagcaggttcttgaacagggcagagcagcagttcccaggaatgctgttctccaagggcacagtgttgttgatgatttctccagtgctttctgctccagccccaggaccctgaggcacactcagctcccgcgcctgcttctctgtcaccatgtcggccctgaccagcggaggcttggctggggcccccaggaacctcaagcccaacaggaatcgaactccagcctggaacttggtctgagtcttcagtacctgggggggctgcttctccaccaggaagcaactggtgacgagggttctcaggacttcatccagccggccagtcagcgatgcccgggtcttgggctcaagctccccaccagccgcccctacctcctgctgtagctgggaataaatgtccaccaggctttcacacctctcctggagtggggccaggctctcctcaaacggtgcgccattccctgccagctgctgctgccgtttccaaatctggatcctcttcagcactagggctttggctgcctctagctctccagtggtctcctgcagtagcatggccagggcctcacttggcccagtcccattagcaggagtttctatcaagctgtgcagagacacttggccagcctcagcccccttctgcagggcttctcggagaaggtggatctcccctactcggtgctgcagcctccgcaagcctgtcttaaacttgagttcttcctgcttccagtggaaaggcattggcaagtggcggaactgttccataacagcttttttctctccttgaagtatttgtctgaaagtggccaccagcttcagggggtccctctgatatatgctctcaagggtgctgatgtgttgcaagatggtgctcccctccccctgctctcccaccgaggcctgaaggtgctggacagtgtctgaaagtagggcactagccaagttgcagcagaaggcgtcggagccgaccaggaactcccagggctggctctccagccagtcacccagaagatgccgcaggtgttggggaaagtcgacatagagccgctgcactttttctgggggcatcttggagaccagaccccacagagacatgatctgggacttggaggttgcctcggcaacccctctgctgtcttctccctttctcagcgggcacttccaggccccataggtctgtagctctgtccagcgagttcaaggctggccctgctagcacctccccccttccaccaccaccaccaaaaagaaaaataagataaagcacacacatacatacacacacacacacacacacacacacacactcctctcccgtcctccctcttcagtgtaagcagtggctgcccc

SEQ ID NO: 447 - RNA, 3805 nt, Mus musculus
  source 1..3805: mol_type = mRNA
gagaagccggaaacagcaggccggggcagccagggtttacagtgaagaaggcccggagacgagtgcgtgcgtgcctgtgtgtgtgtttgtgtgtgtgtgcgcgcgctcgagcgtgtgcgcgcgtgcctgtgtgcatatgtgtgtgtgtgtctgtacacattgagtttttagggccagcccaggacccgctggacagacctacagacccatggggcttggtagtgccctctgagagagggagaagatagcagcggggctgctgaggcaccctgtatatcccagatcatgtctctgtggggcctaatttccaagatgtccccagaaaaactgcaacggctctatgttgactttccacaacgcctacggcatctcctggctgactggctggagagccagccctgggagttcctggtcggttcagatgctttctgttacaacatggccagtgccctactttctgccacagtccagcgtcttcaggccactgctggagagcaggggaagggaaacagcatcttgccgcacatcagcaccttggagagcatctatcagagggaccccctgaagctggtggccaccatcagacaaatacttcaaggggagaaaaaagctgttatagaagagttccgccacctgccagggcccttccatcggaagcaggaagaactcaagtttactacagccctcggaaggcttcagcatcgagtaagggagacccggcttctccgagaatctctgcagcaaggggctaagactggacaagtgtctctgcagaatttgatagaccctcctgtcaatggtcctggtccaagtgaggacctggccaccatgctgcaggggactgtgggggacctggaggccacccaggccctggtgctgaaaaggattcagatttggaagcggcagcaacagctggcagggaatggcacaccctttgaggagagcctagcagggctgcaggagaggtgtgaaagcctggtggaaatttattcccagctgcagcaggagattggggcagccagtggagaactggaacccaagacccgggcatcgctgataagccgtctggatgaagtcctgcgaacccttgtgaccagctctttcctggtggagaagcagcccccgcaggttctgaagacacagactaagttccaggctggggttcgattcctgctgggtctgcagtttctagggacctcagccaagcctccaatggtcagagctgacatggtgacagagaaacaggccagagaactaagcctggcccaggggcccgggactggagtggagagcacaggagagatcatgaacaacacggtgcccctggagaacagcattcccagcaactgctgctccgccctgttcaagaacctgctcctgaagaaaataaagcgctgtgagcggaagggcacagagtctgtcaccgaggagaagtgtgctgtgctcttctccacgagcttcacattgggccccaacaaacttctcatccagcttcaggccctgtctctgcccttggtggtcatcgtgcatggtaaccaagacaacaacgccaaagctaccatcctatgggacaatgccttctctgagatggaccgagtgccctttgtggtggctgagcgagtgccctgggagaagatgtgtgaaaccctaaacctcaagtttatggctgaggtggggaccagccggggactgcttccagagcacttcctgttcctcgcccagaagatcttcaacgacaacagcctcagtgtggaggcctttcagcaccgctgtgtgtcctggtcacagttcaataaggagatcctgctgggccgaggcttcacattttggcagtggtttgatggtgtcctggacctcaccaaacgctgtctccggagctactggtcagatcggctgatcattggctttattagtaagcaatatgtcactagccttctcctcaatgagccagatgggaccttcctcctccgctttagcgactctgagatcgggggcatcaccattgcacacgtcatccggggtcaggatggctcctcacagatagagaacatccagccattttctgccaaagacctgtccattcgctcactgggggaccggatccgggatcttgctcagttaaaaaacctctaccccaagaaacccaaagatgaggctttccggagtcactataagcccgaacagatggggaaggacgggaggggttatgtctctactactatcaagatgactgtggaaagggaccagccccttcctactccagagccccagatgcctgccatggtgccaccttatgatcttggaatggcccctgatgcttccatgcaactcagctcagatatggggtatcctccacagtccatccactcatttcagagcctagaagagtccatgagtgtactgccatcttttcaggagcctcacctgcaaatgccccccaacatgagccagataaccatgccctttgaccagcctcacccccagggtctgctgcagtgccagtcccaggaacatgctgtgtccagccctgaacccatgctttgctcagatgtgactatggtagaggacagctgcctaactcagcctgtgggaggtttcccccaaggcacctgggtcagtgaagacatgtaccctcccctgatgcctcccactgaacaggacctcaccaagcttctcctggagaaccaaggggaggcaggagggtccttaggaagccagcccctcctgcaaccatctccttatgggcaatcagggatctcactgtcccacctggacctaaggaccaaccccagctggtgatcccagctggagaagcccagaaacaaagcctcttctgtctctatggaccagctctggacacctgctcatgcaggtgccttccgtctcaactgttccttggtcaagagaaaagaactggctgggagaccatgtggtgtatggaactgctgtgctctgtccttcctgccatatcagggccccccttttccagcactgggtgcaaagggatgagtggggtgttaatgctcgaatgtgatacaactgtatcacaacacacacgcacacacacatacacacacaccagaactgtgttgagccagggcctgggactcaacatacagaaacatagagacattgtgccaaagacagagggcatataggcctagggcattgaagctgggctcaggtgactctgggagggagaaaaaggaaaaagtgggtatacagtcactggtgtgagttctacccagattttaaaaaacaagactccaaagctccaaattcttgcaaaaaaagatgcctagtgacatttgagactgcattctaagagctaagcttgtgtatagctgtaccaatgtttacccaagacatgttaacctatagaagtcacacatcactgtatgaccgcacagaacatgtatcttctgcttttgccagtgtgaccttaacatatctgaaaggctgagacattgtataagacagcaacccagtatcatttggggagtaactatgtggctgtgacatgcataaagctctagcctgggtaacttgatgcttccagtgtttcctagagcctgggatataagtagggatgcagacctctctgtgtaaactccctgggcgttgaggccctcaactgctgtctcttgtacttttctgtccactgccagctctgcccccctcccccggctcttacccagtcctttttccctcactggaggggaagggggccatggatcctaagccataaaataaattttattccaaaataacaaaataaataatctactgtacacaatctgaaaag

SEQ ID NO: 448 - RNA, 3805 nt, Mus musculus
  source 1..3805: mol_type = mRNA
cttttcagattgtgtacagtagattatttattttgttattttggaataaaatttattttatggcttaggatccatggcccccttcccctccagtgagggaaaaaggactgggtaagagccgggggaggggggcagagctggcagtggacagaaaagtacaagagacagcagttgagggcctcaacgcccagggagtttacacagagaggtctgcatccctacttatatcccaggctctaggaaacactggaagcatcaagttacccaggctagagctttatgcatgtcacagccacatagttactccccaaatgatactgggttgctgtcttatacaatgtctcagcctttcagatatgttaaggtcacactggcaaaagcagaagatacatgttctgtgcggtcatacagtgatgtgtgacttctataggttaacatgtcttgggtaaacattggtacagctatacacaagcttagctcttagaatgcagtctcaaatgtcactaggcatctttttttgcaagaatttggagctttggagtcttgttttttaaaatctgggtagaactcacaccagtgactgtatacccactttttcctttttctccctcccagagtcacctgagcccagcttcaatgccctaggcctatatgccctctgtctttggcacaatgtctctatgtttctgtatgttgagtcccaggccctggctcaacacagttctggtgtgtgtgtatgtgtgtgtgcgtgtgtgttgtgatacagttgtatcacattcgagcattaacaccccactcatccctttgcacccagtgctggaaaaggggggccctgatatggcaggaaggacagagcacagcagttccatacaccacatggtctcccagccagttcttttctcttgaccaaggaacagttgagacggaaggcacctgcatgagcaggtgtccagagctggtccatagagacagaagaggctttgtttctgggcttctccagctgggatcaccagctggggttggtccttaggtccaggtgggacagtgagatccctgattgcccataaggagatggttgcaggaggggctggcttcctaaggaccctcctgcctccccttggttctccaggagaagcttggtgaggtcctgttcagtgggaggcatcaggggagggtacatgtcttcactgacccaggtgccttgggggaaacctcccacaggctgagttaggcagctgtcctctaccatagtcacatctgagcaaagcatgggttcagggctggacacagcatgttcctgggactggcactgcagcagaccctgggggtgaggctggtcaaagggcatggttatctggctcatgttggggggcatttgcaggtgaggctcctgaaaagatggcagtacactcatggactcttctaggctctgaaatgagtggatggactgtggaggataccccatatctgagctgagttgcatggaagcatcaggggccattccaagatcataaggtggcaccatggcaggcatctggggctctggagtaggaaggggctggtccctttccacagtcatcttgatagtagtagagacataacccctcccgtccttccccatctgttcgggcttatagtgactccggaaagcctcatctttgggtttcttggggtagaggttttttaactgagcaagatcccggatccggtcccccagtgagcgaatggacaggtctttggcagaaaatggctggatgttctctatctgtgaggagccatcctgaccccggatgacgtgtgcaatggtgatgcccccgatctcagagtcgctaaagcggaggaggaaggtcccatctggctcattgaggagaaggctagtgacatattgcttactaataaagccaatgatcagccgatctgaccagtagctccggagacagcgtttggtgaggtccaggacaccatcaaaccactgccaaaatgtgaagcctcggcccagcaggatctccttattgaactgtgaccaggacacacagcggtgctgaaaggcctccacactgaggctgttgtcgttgaagatcttctgggcgaggaacaggaagtgctctggaagcagtccccggctggtccccacctcagccataaacttgaggtttagggtttcacacatcttctcccagggcactcgctcagccaccacaaagggcactcggtccatctcagagaaggcattgtcccataggatggtagctttggcgttgttgtcttggttaccatgcacgatgaccaccaagggcagagacagggcctgaagctggatgagaagtttgttggggcccaatgtgaagctcgtggagaagagcacagcacacttctcctcggtgacagactctgtgcccttccgctcacagcgctttattttcttcaggagcaggttcttgaacagggcggagcagcagttgctgggaatgctgttctccaggggcaccgtgttgttcatgatctctcctgtgctctccactccagtcccgggcccctgggccaggcttagttctctggcctgtttctctgtcaccatgtcagctctgaccattggaggcttggctgaggtccctagaaactgcagacccagcaggaatcgaaccccagcctggaacttagtctgtgtcttcagaacctgcgggggctgcttctccaccaggaaagagctggtcacaagggttcgcaggacttcatccagacggcttatcagcgatgcccgggtcttgggttccagttctccactggctgccccaatctcctgctgcagctgggaataaatttccaccaggctttcacacctctcctgcagccctgctaggctctcctcaaagggtgtgccattccctgccagctgttgctgccgcttccaaatctgaatccttttcagcaccagggcctgggtggcctccaggtcccccacagtcccctgcagcatggtggccaggtcctcacttggaccaggaccattgacaggagggtctatcaaattctgcagagacacttgtccagtcttagccccttgctgcagagattctcggagaagccgggtctcccttactcgatgctgaagccttccgagggctgtagtaaacttgagttcttcctgcttccgatggaagggccctggcaggtggcggaactcttctataacagcttttttctccccttgaagtatttgtctgatggtggccaccagcttcagggggtccctctgatagatgctctccaaggtgctgatgtgcggcaagatgctgtttcccttcccctgctctccagcagtggcctgaagacgctggactgtggcagaaagtagggcactggccatgttgtaacagaaagcatctgaaccgaccaggaactcccagggctggctctccagccagtcagccaggagatgccgtaggcgttgtggaaagtcaacatagagccgttgcagtttttctggggacatcttggaaattaggccccacagagacatgatctgggatatacagggtgcctcagcagccccgctgctatcttctccctctctcagagggcactaccaagccccatgggtctgtaggtctgtccagcgggtcctgggctggccctaaaaactcaatgtgtacagacacacacacacatatgcacacaggcacgcgcgcacacgctcgagcgcgcgcacacacacacaaacacacacacaggcacgcacgcactcgtctccgggccttcttcactgtaaaccctggctgccccggcctgctgtttccggcttctc

SEQ ID NO: 449 - RNA, 2635 nt, Rattus norvegicus
  source 1..2635: mol_type = mRNA
agacccatgggcttggtagtgcccgctgagagagggagaagatagcagcggggctgccgaggcaccctgcgatatcccagatcatgtctctgtggagtctagtttccaagatgtccccagaaaaactgcaacggctctatgttgactttccacaacacctgcggcatcttctggccgaatggctggagaatcagccctgggagttcctggttggttcagatgctttctgttacaacatggctagtgccctactttctgccactgtccagcgtcttcaggcctctgcaggagagcaggggaaaggaagcagcctcttgcagcacatcagcaccttggagagcatctatcagagggaccccctgaagctggtggccaccatcagacaaatacttcaaggggagaaaaaagctgttatagaagagttccaccacctgccagggcccttccatcgaaagcaggaagaactcaagtttactacagccctgggcaggcttcagcaccgagtaagggagaccaggattctccgagaatctctgcagcaggggaccaagactgcgcaagtgtctctgaagaacttgatagaccctcctgccaatggcactggtccaagtgaggatctggccacgatgctgcaggggactgtgggggacttggaggccacccaggctctagtgctgaaaaggattcagatttggaagcggcaacagcagctggcagggaatggcacaccctttgaggagagcctggcagggctgcaggagaggtgtgaaagcctggtggaaatttattcccagctgcagcaggagattggagcagccagtggggagcttgagcccaagacccgggcatcgctcataagccgtctggatgaagtcctgcgaacccttgtgaccagctctttcctggtggagaagcagcccccacaggttctgaagacacagactaagtttcaggctggggttcgattcctactgggtctgcagttcctagggacctcagccaagcctccactggtcagagctgacatggtgacagagaaacaggccagagaactaagcctgccccaggggtctggggctggagtggagagcacaggagagatcatgaacaatactgtacctctggagaacagtgttcctgggaactgctgctctgccctcttcaagaacctgctcctgaagaaaatcaagcgctgtgagcggaagggtacagagtctgtcaccgaagagaagtgcgctgtgctcttctctacgagcttcatgctgggccccaacaaacacctcatccagcttcaggccctgtctctgcccttggtggtcatcgttcatggcaaccaagacaacaatgccaaagctaccatcctgtgggataatgccttctctgagatggaccgagtgccctttgtggtagctgagcgagtgccctgggagaaaatgtgtgaaactctgaacctcaagtttatggctgaggtggggaccagccggggactgctaccagaacacttcctgttcctggcccagaagatcttcaatgacaacagccttagcatagaggcctttcagcaccgctgtgtgtcttggtcacagttcaacaaggagattctactgggccgaggcttcactttttggcagtggtttgatggtgtcctggacctcactaaacgctgtcttcggagctactggtcagatcggctgatcatcggctttatcagtaagcaatatgtcactagccttctcctcaacgagccagatggaaccttcctcctccgctttagcgactctgagattgggggcatcaccattgcccatgtcatccggggtcaggatggctcctcacagatagagaacatccagccgttttctgccaaagacctatccattcgctcactgggggaccgaatccgagatcttgctcaattaaaaaacctctaccccaagaaacccaaggatgaggcttttcggagccactataagccggaacagatgggaaaggacgggaggggttatgtctcaactactatcaagatgactgtggaaagggaccagccccttcctactccagagccccagatgcctgccatggtggccccttatgatcttggaatggcccctgatgcttccatgcaactcagctcagatatggtgtatcctccacagtctcattccatccactcatttcagagcatccccctagaagagtccatgagtgtactgccaccctttcaggagcctcacctccaaatgccccccaccatgagccagataagcatgccctttgaccagcctcatccccagggcctgctccagtgccagtcccaggagcatgcggtgtccagccctgaacccttgctgtgttcagatgtcactatggcggaagacagctgcctaactcagcctgtgcaaggtttcccccagggcacctgggtcagcgaaggcatgtaccctcccctgatgcctcccactgaacaggacctcaccaagcttctcctagagggccaaggggaaggtggaggatccatagggactcagcccctcctgcaaccatcttcttatgggcaatcggggatctcaatgtcccacctggacctaaggaccaaccccagttggtgatcccaactggagaagcccagagacag

SEQ ID NO: 450 - RNA, 2635 nt, Rattus norvegicus
  source 1..2635: mol_type = mRNA
ctgtctctgggcttctccagttgggatcaccaactggggttggtccttaggtccaggtgggacattgagatccccgattgcccataagaagatggttgcaggaggggctgagtccctatggatcctccaccttccccttggccctctaggagaagcttggtgaggtcctgttcagtgggaggcatcaggggagggtacatgccttcgctgacccaggtgccctgggggaaaccttgcacaggctgagttaggcagctgtcttccgccatagtgacatctgaacacagcaagggttcagggctggacaccgcatgctcctgggactggcactggagcaggccctggggatgaggctggtcaaagggcatgcttatctggctcatggtggggggcatttggaggtgaggctcctgaaagggtggcagtacactcatggactcttctagggggatgctctgaaatgagtggatggaatgagactgtggaggatacaccatatctgagctgagttgcatggaagcatcaggggccattccaagatcataaggggccaccatggcaggcatctggggctctggagtaggaaggggctggtccctttccacagtcatcttgatagtagttgagacataacccctcccgtcctttcccatctgttccggcttatagtggctccgaaaagcctcatccttgggtttcttggggtagaggttttttaattgagcaagatctcggattcggtcccccagtgagcgaatggataggtctttggcagaaaacggctggatgttctctatctgtgaggagccatcctgaccccggatgacatgggcaatggtgatgcccccaatctcagagtcgctaaagcggaggaggaaggttccatctggctcgttgaggagaaggctagtgacatattgcttactgataaagccgatgatcagccgatctgaccagtagctccgaagacagcgtttagtgaggtccaggacaccatcaaaccactgccaaaaagtgaagcctcggcccagtagaatctccttgttgaactgtgaccaagacacacagcggtgctgaaaggcctctatgctaaggctgttgtcattgaagatcttctgggccaggaacaggaagtgttctggtagcagtccccggctggtccccacctcagccataaacttgaggttcagagtttcacacattttctcccagggcactcgctcagctaccacaaagggcactcggtccatctcagagaaggcattatcccacaggatggtagctttggcattgttgtcttggttgccatgaacgatgaccaccaagggcagagacagggcctgaagctggatgaggtgtttgttggggcccagcatgaagctcgtagagaagagcacagcgcacttctcttcggtgacagactctgtacccttccgctcacagcgcttgattttcttcaggagcaggttcttgaagagggcagagcagcagttcccaggaacactgttctccagaggtacagtattgttcatgatctctcctgtgctctccactccagccccagacccctggggcaggcttagttctctggcctgtttctctgtcaccatgtcagctctgaccagtggaggcttggctgaggtccctaggaactgcagacccagtaggaatcgaaccccagcctgaaacttagtctgtgtcttcagaacctgtgggggctgcttctccaccaggaaagagctggtcacaagggttcgcaggacttcatccagacggcttatgagcgatgcccgggtcttgggctcaagctccccactggctgctccaatctcctgctgcagctgggaataaatttccaccaggctttcacacctctcctgcagccctgccaggctctcctcaaagggtgtgccattccctgccagctgctgttgccgcttccaaatctgaatccttttcagcactagagcctgggtggcctccaagtcccccacagtcccctgcagcatcgtggccagatcctcacttggaccagtgccattggcaggagggtctatcaagttcttcagagacacttgcgcagtcttggtcccctgctgcagagattctcggagaatcctggtctcccttactcggtgctgaagcctgcccagggctgtagtaaacttgagttcttcctgctttcgatggaagggccctggcaggtggtggaactcttctataacagcttttttctccccttgaagtatttgtctgatggtggccaccagcttcagggggtccctctgatagatgctctccaaggtgctgatgtgctgcaagaggctgcttcctttcccctgctctcctgcagaggcctgaagacgctggacagtggcagaaagtagggcactagccatgttgtaacagaaagcatctgaaccaaccaggaactcccagggctgattctccagccattcggccagaagatgccgcaggtgttgtggaaagtcaacatagagccgttgcagtttttctggggacatcttggaaactagactccacagagacatgatctgggatatcgcagggtgcctcggcagccccgctgctatcttctccctctctcagcgggcactaccaagcccatgggtct

SEQ ID NO: 451 - RNA, 4015 nt, Macaca fascicularis
  source 1..4015: mol_type = mRNA
cttctctgtgtcgtcagagctccagggagggacctgggtagaaggagaagccggaaacagcgggctggggcagccactgcttacactgaagagggaggacgggagaggagtgtgtgtgtgtgtatgtatgtgtgtgttttattttatttttctttttggtgatggtggtggaaggggggaggtgctagcagggccagccttgaactcgctggacagagctacagacctatggggcctggcagtgcccgctgagaaagggagaagacagcagaggggttgcctccgaggcaacctccaagtcccagatcatgtctctgtggggtctggtctccaagatgcccccagaaaaagtgcagcggctctatgtcgactttccccaacacctgcggcatcttctgggtgactggctggagagccagccctgggagttcctggtcggctcagacgccttctgctgcaacatggctagtgccctactttcagacactgtccagcgccttcaggcctcggcgggagagcagggggaggggagcaccatcttgcaacacatcagtaccctggagagcatatatcagagggaccccctgaagctggtggccactttcagacaaatacttcaaggagagaaaaaagctgttatggaacagtttcgccacttgccaatgcctttccactggaagcaggaagaactcaagttcaagacagccctgcggaggctgcagcaccgagtaggggagatccaccttcttcgagaagccctgcagaagggggctgatgctggccaagtgtctctgcacagcttgatagaaactcctgctaatgggactgggccaagtgaggccctggccctgctactgcaggagaccactggagagctggagacagccaaggcgctagtgctgaagaggatccagatttggaaacggcagcagcagctggcagggaatggcgcaccctttgaggagagcctggccccactccaggagaggtgtgagagcctggtggacatttattcccagctacagcaggaggtaggggcggctggtggggagcttgagcccaagacccgggcatcgctgattggccggctggatgaagtcctgcgaaccctcgtcaccagttgtttcctggtggagaagcagccgccccaggtactgaagactcagaccaagttccaggctggagttcgattcctgttgggcttgaggttcctgggggccccagccaagcctccactggtcagggctgacatggtgacagagaagcaggcgagggagctgagtgtgcctcagggtcctggggctggagcagaaagcactggagaaatcatcaacaacactgtgcccttggagaacagcattcctgggaactgctgctctgccctgttcaagaacctgcttctcaagaagatcaagcggtgtgagcggaagggcactgagtctgtcacagaggagaagtgcgctgtgctcttctctgccagcttcacacttggccccggcaaactccccatccagctccaggccctgtctctgcccctggtggtcatcgtccatggcaaccaagacaacaatgccaaagccaccatcctgtgggacaatgccttctctgagatggaccgcgtgccctttgtggtggctgagcgggtgccctgggagaagatgtgtgaaactctgaacttgaagttcatggctgaggtggggaccaaccgggggctgctcccagagcacttcctcttcctggcccagaagatcttcaatgacaacagcctcagcatggaggccttccagcaccgttctgtgtcctggtcacagttcaacaaggagatcctgctgggccgtggcttcaccttttggcagtggtttgatggtgtcctggacctcaccaaacgctgtctccggagctactggtctgaccggctgattatcggcttcatcagcaaacagtacgttactagccttcttctgaacgagcccgacggaacctttctcctccgcttcagcgactcagagattgggggcatcaccattgcccacgtcatccggggccaggatggctctccacagatagagaacatccagccattctctgccaaagacctgtccattcgttcactgggggaccgaatccgggatcttgctcagctcaaaaacctctatcccaagaagcccaaggatgaggctttccggagccactacaagcctgaacagatgggtaaggatggcaggggttatgtcccagctaccatcaagatgaccgtggaaagggaccagccacttcctaccccagagctccagatgcctaccatggtgccttcttatgaccttggaatggcccctgattcctccatgagcatgcagcttggcccagatatggtgccccaggtgtacccaccacactctcactccatccccccgtatcaaggcctctccccagaagaatcagtcaatgtgttgtccgccttccaggagcctcacctgcagatgccccccagcctgggccagatgagcctgtcctttgaccagcctcacccccagggcctgctgccatgccagcctcaggagcatgctgtgtccagccctgaccccctgctctgctcagatgtgaccatggtggaagacagctgcctgagccagccagtgagagcgttttctcagggcacttggattggtgaagacatattccctcctctgctgccgcccactgaacaggacctcactaagcttctcctggaggggcaaggggaatcggggggagggtccttgggggcccagcccctcctgcaaccctcccactatgggcaatctgggatctcaatgtcccacatggacctaagggccaaccccagttggtgatcccagccgggagggagaacccagagagacagctcttctactacccccacagacctgctctggacacttactcatgccctgccaagcagcagatggggagggtgccctcctatccccacctacttctcggtcaggaggaaaagacaggagaatgcatggtgggtggagccaatccactccttcctttcatcattcccctgcccacctccttccagcactgactggaagggaagttcaggctctgagacacgccccaacatgcccgcacctgcagcgcgcacacgcacgcacacacacatacagagctctctgagggtgatggggctgagcaggaggtgggctgggtaggagtacaggttagggcatggaaggcttctccgcccactctgacccagggcctaggatggttaggcaggaacatacagacacatttacgctagaggccagggatagaggatattaggtctcagccctgggggaatgggaagcagctcaagggaccctggatggagcacaggaggggtctggacatgtggttaccaatacaagttttgccctgattaaaaaatctcccaaagccccaaattcctgttagcgaggtggaggcttctgatatgtgtatgagactatgcaaaagtacaagggccgagtttcttcatgtatagctgtgtgaacgtgtatgtacctaagatatgttaatgtatagctggcatgttagttgcatgaccacatagaacatgtgtctgcttttgcctgtttgacaacacaaatttgggagtgtgagacattgcacagaagacagcagcaagtgtgctggcctctctgacatatgctaacccaaaaatactctgaatttggagtctgactgtgcccaagtgggtccaagtggctgtgacatctacatatggctccatatctccaatgctgcctgggagccagggtgagtgtctgggtccaggcctgaccatgtggccctccagtgtatgaaggggccctgcctgctgtatcttctctgttgccctatccactgccagcttcccttcactcccccatcccatgtcaccgtttctccctctcgaggcaggggtcatagatcctaagccataaaataaattttattccaaaataacaaaataaataatctactgtacacaatctgaaaa

SEQ ID NO: 452 - RNA, 4015 nt, Macaca fascicularis
  source 1..4015: mol_type = mRNA
ttttcagattgtgtacagtagattatttattttgttattttggaataaaatttattttatggcttaggatctatgacccctgcctcgagagggagaaacggtgacatgggatgggggagtgaagggaagctggcagtggatagggcaacagagaagatacagcaggcagggccccttcatacactggagggccacatggtcaggcctggacccagacactcaccctggctcccaggcagcattggagatatggagccatatgtagatgtcacagccacttggacccacttgggcacagtcagactccaaattcagagtatttttgggttagcatatgtcagagaggccagcacacttgctgctgtcttctgtgcaatgtctcacactcccaaatttgtgttgtcaaacaggcaaaagcagacacatgttctatgtggtcatgcaactaacatgccagctatacattaacatatcttaggtacatacacgttcacacagctatacatgaagaaactcggcccttgtacttttgcatagtctcatacacatatcagaagcctccacctcgctaacaggaatttggggctttgggagattttttaatcagggcaaaacttgtattggtaaccacatgtccagacccctcctgtgctccatccagggtcccttgagctgcttcccattcccccagggctgagacctaatatcctctatccctggcctctagcgtaaatgtgtctgtatgttcctgcctaaccatcctaggccctgggtcagagtgggcggagaagccttccatgccctaacctgtactcctacccagcccacctcctgctcagccccatcaccctcagagagctctgtatgtgtgtgtgcgtgcgtgtgcgcgctgcaggtgcgggcatgttggggcgtgtctcagagcctgaacttcccttccagtcagtgctggaaggaggtgggcaggggaatgatgaaaggaaggagtggattggctccacccaccatgcattctcctgtcttttcctcctgaccgagaagtaggtggggataggagggcaccctccccatctgctgcttggcagggcatgagtaagtgtccagagcaggtctgtgggggtagtagaagagctgtctctctgggttctccctcccggctgggatcaccaactggggttggcccttaggtccatgtgggacattgagatcccagattgcccatagtgggagggttgcaggaggggctgggcccccaaggaccctccccccgattccccttgcccctccaggagaagcttagtgaggtcctgttcagtgggcggcagcagaggagggaatatgtcttcaccaatccaagtgccctgagaaaacgctctcactggctggctcaggcagctgtcttccaccatggtcacatctgagcagagcagggggtcagggctggacacagcatgctcctgaggctggcatggcagcaggccctgggggtgaggctggtcaaaggacaggctcatctggcccaggctggggggcatctgcaggtgaggctcctggaaggcggacaacacattgactgattcttctggggagaggccttgatacggggggatggagtgagagtgtggtgggtacacctggggcaccatatctgggccaagctgcatgctcatggaggaatcaggggccattccaaggtcataagaaggcaccatggtaggcatctggagctctggggtaggaagtggctggtccctttccacggtcatcttgatggtagctgggacataacccctgccatccttacccatctgttcaggcttgtagtggctccggaaagcctcatccttgggcttcttgggatagaggtttttgagctgagcaagatcccggattcggtcccccagtgaacgaatggacaggtctttggcagagaatggctggatgttctctatctgtggagagccatcctggccccggatgacgtgggcaatggtgatgcccccaatctctgagtcgctgaagcggaggagaaaggttccgtcgggctcgttcagaagaaggctagtaacgtactgtttgctgatgaagccgataatcagccggtcagaccagtagctccggagacagcgtttggtgaggtccaggacaccatcaaaccactgccaaaaggtgaagccacggcccagcaggatctccttgttgaactgtgaccaggacacagaacggtgctggaaggcctccatgctgaggctgttgtcattgaagatcttctgggccaggaagaggaagtgctctgggagcagcccccggttggtccccacctcagccatgaacttcaagttcagagtttcacacatcttctcccagggcacccgctcagccaccacaaagggcacgcggtccatctcagagaaggcattgtcccacaggatggtggctttggcattgttgtcttggttgccatggacgatgaccaccaggggcagagacagggcctggagctggatggggagtttgccggggccaagtgtgaagctggcagagaagagcacagcgcacttctcctctgtgacagactcagtgcccttccgctcacaccgcttgatcttcttgagaagcaggttcttgaacagggcagagcagcagttcccaggaatgctgttctccaagggcacagtgttgttgatgatttctccagtgctttctgctccagccccaggaccctgaggcacactcagctccctcgcctgcttctctgtcaccatgtcagccctgaccagtggaggcttggctggggcccccaggaacctcaagcccaacaggaatcgaactccagcctggaacttggtctgagtcttcagtacctggggcggctgcttctccaccaggaaacaactggtgacgagggttcgcaggacttcatccagccggccaatcagcgatgcccgggtcttgggctcaagctccccaccagccgcccctacctcctgctgtagctgggaataaatgtccaccaggctctcacacctctcctggagtggggccaggctctcctcaaagggtgcgccattccctgccagctgctgctgccgtttccaaatctggatcctcttcagcactagcgccttggctgtctccagctctccagtggtctcctgcagtagcagggccagggcctcacttggcccagtcccattagcaggagtttctatcaagctgtgcagagacacttggccagcatcagcccccttctgcagggcttctcgaagaaggtggatctcccctactcggtgctgcagcctccgcagggctgtcttgaacttgagttcttcctgcttccagtggaaaggcattggcaagtggcgaaactgttccataacagcttttttctctccttgaagtatttgtctgaaagtggccaccagcttcagggggtccctctgatatatgctctccagggtactgatgtgttgcaagatggtgctcccctccccctgctctcccgccgaggcctgaaggcgctggacagtgtctgaaagtagggcactagccatgttgcagcagaaggcgtctgagccgaccaggaactcccagggctggctctccagccagtcacccagaagatgccgcaggtgttggggaaagtcgacatagagccgctgcactttttctgggggcatcttggagaccagaccccacagagacatgatctgggacttggaggttgcctcggaggcaacccctctgctgtcttctccctttctcagcgggcactgccaggccccataggtctgtagctctgtccagcgagttcaaggctggccctgctagcacctccccccttccaccaccatcaccaaaaagaaaaataaaataaaacacacacatacatacacacacacacactcctctcccgtcctccctcttcagtgtaagcagtggctgccccagcccgctgtttccggcttctccttctacccaggtccctccctggagctctgacgacacagagaag

SEQ ID NO: 453 - RNA, 3824 nt, Macaca mulatta
  source 1..3824: mol_type = mRNA
ccagggagggacctgggtagaaggagaagccggaaacagcgggctggggcagccactgcttacactgaagagggaggacgggagaggagtgtgtgtgtgtgtatgcaacctccaagtcccagatcatgtctctgtggggtctggtctccaagatgcccccagaaaaagtgcagcggctctatgtcgactttccccaacacctgcggcatcttctgggtgactggctggagagccagccctgggagttcctggtcggctcagacgccttctgctgcaacatggctagtgccctactttcagacactgtccagcgccttcaggcctcggcgggagagcagggggaggggagcaccatcttgcaacacatcaataccctggagagcatatatcagagggaccccctgaagctggtggccactttcagacaaatacttcaaggagagaaaaaagctgttatggaacagtttcgccacttgccaatgcctttccactggaagcaggaagaactcaagttcaagacagccctgcggaggctgcagcaccgagtaggggagatccaccttcttcgagaagccctgcagaagggggctgacgctggccaagtgtctctgcacagcttgatagaaactcctgctaatgggactgggccaagtgaggccctggccctgctactacaggagaccactggagagctggagacagccaaggccctagtgctgaagaggatccagatttggaaacggcagcagcagctggcagggaatggcgcaccctttgaggagagcctggccccactccaggagaggtgtgagagcctggtggacatttattcccagctacagcaggaggtaggggcggctggtggggagcttgagcccaagacccgggcatcgctgattggccggctggatgaagtcctgcgaaccctcgtcaccagttgtttcctggtggagaagcagccgccccaggtactgaagactcagaccaagttccaggctggagttcgattcctgttgggcttgaggttcctgggggccccagccaagcctccactggtcagggctgacatggtgacagagaagcaggcgagggagctgagtgtgcctcagggtcctggggctggagcagaaagcactggagaaatcatcaacaacactgtgcccttggagaacagcattcctgggaactgctgctctgccctgttcaagaacctgcttctcaagaagatcaagcggtgtgagcggaagggcactgagtctgtcacagaggagaagtgcgctgtgctcttctctgccagcttcacacttggccccggcaaactccccatccagctccaggccctgtctctgcccctggtggtcatcgtccatggcaaccaagacaacaatgccaaagccaccatcctgtgggacaatgccttctctgagatggaccgcgtgccctttgtggtggctgagcgggtgccctgggagaagatgtgtgaaactctgaacttgaagttcatggctgaggtggggaccaaccgggggctgctcccagagcacttcctcttcctggcccagaagatcttcaatgacaacagcctcagcatggaggccttccagcaccgttctgtgtcctggtcacagttcaacaaggagatcctgctgggccgtggcttcaccttttggcagtggtttgatggtgtcctggacctcaccaaacgctgtctccggagctactggtctgaccggctgattatcggcttcatcagcaaacagtacgttactagccttcttctgaacgagcccgacggaacctttctcctccgcttcagcgactcagagattgggggcatcaccattgcccacgtcatccggggccaggatggctctccacagatagagaacatccagccattctctgccaaagacctgtccattcgttcactgggggaccgaatccgggatcttgctcagctcaaaaacctctatcccaagaagcccaaggatgaggctttccggagccactacaagcctgaacagatgggtaaggatggcaggggttatgtcccagctaccatcaagatgaccgtggaaagggaccagccacttcctaccccagagctccagatgcctaccatggtgccttcttatgaccttggaatggcccctgattcctccatgagcatgcagcttggcccagatatggtgccccaggtgtacccaccacactctcactccatccccccgtatcaaggcctctccccagaagaatcagtcaatgtgttgtcagccttccaggagcctcacctgcagatgccccccagcctgggccagatgagcctgtcctttgaccagcctcacccccagggcctgctgccatgccagcctcaggagcatgctgtgtccagccctgaccccctgctctgctcagatgtgaccatggtggaagacagctgcctgagccagccagtgagagcgttttctcagggcacttggattggtgaagacatattccctcctctgctgcctcccactgaacaggacctcactaagcttctcctggaggggcaaggggaatcggggggagggtccttgggggcccagcccctcctgcaaccctcccactatgggcaacctgggatctcaatgtcccacatggacctaagggccaaccccagttggtgatcccagccgggagggagaacccagagagacagctcttctactacccccacagacctgctctggacacttactcatgccctgccaagcagcagatggggagggtgccctcctatccccacctacttctcggtcaggaggaaaagacaggagaatgcacggtgggtggagccaatccactccttcctttcatcattcccctgcccacctccttccagcactgactggaagggaagttcaggctctgagacacgccccaacatgcccgcacctgcagcgcgcacacgcacgcacacacacatacagagctctctgagggtgatggggctgagcaggaggtgggctgggtaggagtacaggttagggcatggaaggcttctccgcccactctgacccagggcctaggatggttaggcaggaacatacagacacatttacgctagaggccagggatagaggatattgggtctcagccctgggggaatgggaagcagctcaagggaccctggatggagcacaggaggggtctggacatgtggttaccaatacaagttttgccctgattaaaaaatctcccaaagccccaaattcctgttagcgaggtggaggcttctgatatgtgtatgagactatgcaaaagtacaagggccgagtttcttcatgtatagctgtgtgaacgtgtatgtacctaagatatgttaatgtatagctggcatgttagttgcatgaccacatagaacatgtgtctgcttttgcctgtttgacaacacaaatttgggagtgtgagacattgcacagaagacagcagcaagtgtgctggcctctctgacatatgctaacccaaaaatactctgaatttggagtctgactgtgcccaagtgggtccaagtggctgtgacatctacatatggctccatatctccaatgctgcctgggagccagggtgagagtctgggtccaggcctgaccatgtggccctccagtgtatgaaggagccctgcctgctgtatcttctctgttgccctatccactgccagcttcccttcactcccccatcccatgtcaccgtttctccctctcgaggcaggggtcatagatcctaagccataaaataaattttattccaaaataacaaaataaataatctactgtacacaa

SEQ ID NO: 454 - RNA, 3824 nt, Macaca mulatta
  source 1..3824: mol_type = mRNA
ttgtgtacagtagattatttattttgttattttggaataaaatttattttatggcttaggatctatgacccctgcctcgagagggagaaacggtgacatgggatgggggagtgaagggaagctggcagtggatagggcaacagagaagatacagcaggcagggctccttcatacactggagggccacatggtcaggcctggacccagactctcaccctggctcccaggcagcattggagatatggagccatatgtagatgtcacagccacttggacccacttgggcacagtcagactccaaattcagagtatttttgggttagcatatgtcagagaggccagcacacttgctgctgtcttctgtgcaatgtctcacactcccaaatttgtgttgtcaaacaggcaaaagcagacacatgttctatgtggtcatgcaactaacatgccagctatacattaacatatcttaggtacatacacgttcacacagctatacatgaagaaactcggcccttgtacttttgcatagtctcatacacatatcagaagcctccacctcgctaacaggaatttggggctttgggagattttttaatcagggcaaaacttgtattggtaaccacatgtccagacccctcctgtgctccatccagggtcccttgagctgcttcccattcccccagggctgagacccaatatcctctatccctggcctctagcgtaaatgtgtctgtatgttcctgcctaaccatcctaggccctgggtcagagtgggcggagaagccttccatgccctaacctgtactcctacccagcccacctcctgctcagccccatcaccctcagagagctctgtatgtgtgtgtgcgtgcgtgtgcgcgctgcaggtgcgggcatgttggggcgtgtctcagagcctgaacttcccttccagtcagtgctggaaggaggtgggcaggggaatgatgaaaggaaggagtggattggctccacccaccgtgcattctcctgtcttttcctcctgaccgagaagtaggtggggataggagggcaccctccccatctgctgcttggcagggcatgagtaagtgtccagagcaggtctgtgggggtagtagaagagctgtctctctgggttctccctcccggctgggatcaccaactggggttggcccttaggtccatgtgggacattgagatcccaggttgcccatagtgggagggttgcaggaggggctgggcccccaaggaccctccccccgattccccttgcccctccaggagaagcttagtgaggtcctgttcagtgggaggcagcagaggagggaatatgtcttcaccaatccaagtgccctgagaaaacgctctcactggctggctcaggcagctgtcttccaccatggtcacatctgagcagagcagggggtcagggctggacacagcatgctcctgaggctggcatggcagcaggccctgggggtgaggctggtcaaaggacaggctcatctggcccaggctggggggcatctgcaggtgaggctcctggaaggctgacaacacattgactgattcttctggggagaggccttgatacggggggatggagtgagagtgtggtgggtacacctggggcaccatatctgggccaagctgcatgctcatggaggaatcaggggccattccaaggtcataagaaggcaccatggtaggcatctggagctctggggtaggaagtggctggtccctttccacggtcatcttgatggtagctgggacataacccctgccatccttacccatctgttcaggcttgtagtggctccggaaagcctcatccttgggcttcttgggatagaggtttttgagctgagcaagatcccggattcggtcccccagtgaacgaatggacaggtctttggcagagaatggctggatgttctctatctgtggagagccatcctggccccggatgacgtgggcaatggtgatgcccccaatctctgagtcgctgaagcggaggagaaaggttccgtcgggctcgttcagaagaaggctagtaacgtactgtttgctgatgaagccgataatcagccggtcagaccagtagctccggagacagcgtttggtgaggtccaggacaccatcaaaccactgccaaaaggtgaagccacggcccagcaggatctccttgttgaactgtgaccaggacacagaacggtgctggaaggcctccatgctgaggctgttgtcattgaagatcttctgggccaggaagaggaagtgctctgggagcagcccccggttggtccccacctcagccatgaacttcaagttcagagtttcacacatcttctcccagggcacccgctcagccaccacaaagggcacgcggtccatctcagagaaggcattgtcccacaggatggtggctttggcattgttgtcttggttgccatggacgatgaccaccaggggcagagacagggcctggagctggatggggagtttgccggggccaagtgtgaagctggcagagaagagcacagcgcacttctcctctgtgacagactcagtgcccttccgctcacaccgcttgatcttcttgagaagcaggttcttgaacagggcagagcagcagttcccaggaatgctgttctccaagggcacagtgttgttgatgatttctccagtgctttctgctccagccccaggaccctgaggcacactcagctccctcgcctgcttctctgtcaccatgtcagccctgaccagtggaggcttggctggggcccccaggaacctcaagcccaacaggaatcgaactccagcctggaacttggtctgagtcttcagtacctggggcggctgcttctccaccaggaaacaactggtgacgagggttcgcaggacttcatccagccggccaatcagcgatgcccgggtcttgggctcaagctccccaccagccgcccctacctcctgctgtagctgggaataaatgtccaccaggctctcacacctctcctggagtggggccaggctctcctcaaagggtgcgccattccctgccagctgctgctgccgtttccaaatctggatcctcttcagcactagggccttggctgtctccagctctccagtggtctcctgtagtagcagggccagggcctcacttggcccagtcccattagcaggagtttctatcaagctgtgcagagacacttggccagcgtcagcccccttctgcagggcttctcgaagaaggtggatctcccctactcggtgctgcagcctccgcagggctgtcttgaacttgagttcttcctgcttccagtggaaaggcattggcaagtggcgaaactgttccataacagcttttttctctccttgaagtatttgtctgaaagtggccaccagcttcagggggtccctctgatatatgctctccagggtattgatgtgttgcaagatggtgctcccctccccctgctctcccgccgaggcctgaaggcgctggacagtgtctgaaagtagggcactagccatgttgcagcagaaggcgtctgagccgaccaggaactcccagggctggctctccagccagtcacccagaagatgccgcaggtgttggggaaagtcgacatagagccgctgcactttttctgggggcatcttggagaccagaccccacagagacatgatctgggacttggaggttgcatacacacacacacactcctctcccgtcctccctcttcagtgtaagcagtggctgccccagcccgctgtttccggcttctccttctacccaggtccctccctgg

1. A compound comprising an av 6 integrin targeting ligand, wherein the compound is of Formula (X): [chemical structure]
or a salt thereof, wherein:
Y is O, N(H), S, or CH₂;
R¹ is hydrogen or C₁₋₆alkyl;
R^{Y} is [chemical structure]
wherein
m is 0, 1, 2, 3, or 4; and
each R² is independently R, or two R² groups on adjacent carbon atoms taken together with the atoms to which they are bound form a fused 4-8 membered ring that is optionally substituted by 1, 2, 3 or 4 groups independently selected from the group consisting of R and a nitrogen protecting group;
and
R^{L} is —N(R³)(R⁴), —O(R⁵), —S(R⁵), or —R⁵, wherein
(i) R³ is hydrogen or C₁₋₆alkyl and R⁴ is R⁵; or
(ii) R³ and R⁴ taken together with the nitrogen atom to which they are attached form a 4-8 membered monocyclic heterocyclyl group that is substituted with R⁵;
and
R⁵ is -L-ZZ-L′-R^{T} wherein
L and L′ are independently -L¹-[G-L²]_{q}-G-L³-, wherein
* is the bond to ZZ;
q is 0_or an integer selected from 1-25;
L¹ is a bond or -B-A-;
each L² is independently -A-B-A-;
L³ is a bond or -A-B-A-;
each G is independently -D-E-F-, wherein D, E, and F are each independently a bond, C₁₋₁₀alkyl, C₂₋₁₀alkenyl, C₂₋₁₀alkynyl, C₃₋₁₀cycloalkyl, 3-10 membered heterocyclyl, aryl, or heteroaryl, each of which is optionally substituted with 1, 2, 3, or 4 R groups;
each A is independently a bond, —O—, —S—, or —N(R^{N})—;
each B is independently a bond, CH₂, C(O), C(S), C(NR^{N}), S(O) S(O)₂, P(O)(OH), P(S)(OH), or P(S)(SH);
each R^{N} is independently hydrogen or C₁₋₆alkyl, or two R^{N} within an -A-B-A- group taken together with the atoms to which they are connected from a 4-8 membered heterocyclyl;
and
ZZ is -A′-B′-A′- or a linking group formed by a reactive pair, wherein
each A′ is independently a bond, —O—, —S—, or —N(R^{N3})—;
each B′ is independently a bond, CH₂, C(O), C(S), C(NR^{N3}), —C═N—, S(O), S(O)₂, P(O)(OH), P(S)(OH), or P(S)(SH); and
each R^{N3} is independently hydrogen or C₁₋₆alkyl, or two R^{N3} within the -A′-B′-A′- group taken together with the atoms to which they are connected from a 4-8 membered heterocyclyl;
R^{T} is -G⁰-OR^{T1}, wherein
G⁰ is absent or -D⁰-E^{U}-F⁰-, wherein Do, E⁰, and F⁰ are independently a bond, C₁₋₁₀alkyl, C₂₋₁₀alkenyl, C₂₋₁₀alkynyl, C₃₋₁₀cycloalkyl, 3-10 membered heterocyclyl, aryl, or heteroaryl, each of which is optionally substituted with 1, 2, 3, or 4 R substituents;
and
R^{T1} is hydrogen, a hydroxyl protecting group, a phosphorous coupling group, -L^{K}-S^{S}, or -L^{L}-oligonucleotide, wherein
L^{K} is a support linking group;
L^{L} is an oligonucleotide linking group; and
S^{S} is a solid support, —OR^{SS} or —N(R^{SS})₂, or hydrogen, wherein
each R^{SS} is independently hydrogen or C₁₋₆alkyl.
and
each R is independently selected from the group consisting of R′, C₁₋₆alkyl, C₁₋₆haloalkyl, C₂₋₆alkenyl, C₂₋₆alkynyl, C₃₋₈cycloalkyl, heterocyclyl, aryl, heteroaryl, C₃₋₈cycloalkylC₁₋₆alkyl, heterocyclylC₁₋₆alkyl, aryl C₁₋₆alkyl, heteroarylC₁₋₆alkyl, each of which, other than R′, is optionally substituted with 1, 2, or 3 R′ groups, wherein
each R′ is independently halogen, cyano, azido, nitro, —N(R^{b})₂, —O(R^{a}), —S(R⁰), —C(O)OR⁰,
C(O)R⁰, —C(O)N(R⁰)₂, —C(NR⁰)OR⁰, —C(NR⁰)R⁰, —C(NR⁰)N(R⁰)₂, —C(S)OR⁰, —C(S)R⁰, —C(S)N(R⁰)₂, —S(O)₂R⁰, —S(O)₂OR⁰, —S(O)₂N(R⁰)₂, —N(R⁰)C(O)OR⁰, —N(R⁰)C(O)R⁰, —N(R⁰)C(O)N(R⁰)₂, —N(R⁰)S(O)₂R⁰, —N(R⁰)S(O)₂OR⁰, —N(R⁰)S(O)₂N(R⁰)₂, —OC(O)OR⁰, —OC(O)R⁰, —OC(O)N(R⁰)₂, —OS(O)₂R⁰, —OS(O)₂OR⁰, —OS(O)₂N(R⁰)₂, or —SC(O)R⁰, wherein
each R⁰ is independently hydrogen or C₁₋₆alkyl; each R^{a} is independently hydrogen, C₁₋₆alkyl, or a hydroxyl protecting group; and each R^{b} is independently hydrogen, C₁₋₆alkyl, or a nitrogen protecting group,
provided that in each -D-E-F- group at least one of D, E, and F is not a bond; and R^{L} is not N-morpholinyl.

2. The compound of claim 1, wherein R^{Y} is; [chemical structure]
wherein p is 0, 1, 2, 3 or 4; and each R²¹ is independently selected from the group consisting of an R and a nitrogen protecting group; [chemical structure]
wherein R^{P} is a nitrogen protecting group; or
wherein R^{P} is a nitrogen protecting group.

3-5. (canceled)

6. The compound of claim 1, wherein -L′-R^{T} is: [chemical structure]
wherein * is the bond to ZZ; and L¹ is a bond, C(O), C(S), S(O)₂, P(O)(OH), or P(S)(OH), or [chemical structure]
wherein* is the bond to ZZ;
L¹ is a bond, C(O), C(S), S(O)₂, P(O)(OH), or P(S)(OH); and
R is —O(R^{a}) or —C₁₋₆alkyl-O(R^{a}), wherein R^{a} is hydrogen or a hydroxyl protecting group.

7. (canceled)

8. The compound of claim 1, wherein —R^{L} is: [chemical structure]
wherein R^{P3} is hydrogen or a hydroxyl protecting group; or

[chemical structure]

9. (canceled)

10. The compound of claim 8, wherein R^{P3} is an optionally substituted trityl group.

11. The compound of claim 1, wherein -L′- is:
(i) -L¹-G-L³-*, wherein * is the bond to ZZ; or
(ii) —C(O)—C₂₋₃₀alkyl-*.

12. (canceled)

13. The compound of claim 1 represented by the following formula:

[chemical structure]

[chemical structure]

14. The compound of claim 1, wherein L is:
(i) -L¹-[G-L²]_{q}-G-L³-*, wherein q is 0, 1, 2, 3, 4, or 5;
(ii) -L¹-G-*, wherein * is the bond to ZZ;
G is C₁₋₁₀alkyl, C₂₋₁₀alkenyl, C₂₋₁₀alkynyl, C₃₋₁₀cycloalkyl, 3-10 membered heterocyclyl, aryl, or heteroaryl, each of which is optionally substituted with 1, 2, 3, or 4 R groups;
L¹ is -B-A-, wherein,
A is a bond, —O—, —S—, or —N(R^{N})—, wherein each R^{N} is independently hydrogen or C₁₋₆alkyl; and
B is a bond, C(O), C(S), S(O)₂, P(O)(OH), or P(S)(OH); [chemical structure]
wherein * is the bond to ZZ; k is an integer from 1 to 10; L¹ is bond, C(O), C(S), C(NR^{N}), S(O)₂, P(O)(OH), or P(S)(OH); and R^{N} is hydrogen or C₁₋₆alkyl;
(iv) a group selected from: [chemical structure]
wherein * is the bond to ZZ; t is an integer from 0 to 10; [chemical structure]
wherein * is the bond to ZZ, t is an integer from 0 to 10; a is an integer from 1 to 3 and s and s′ are each independently an integer from 1 to 24; [chemical structure]
wherein * is the bond to ZZ; a is 1, 2 or 3; and each s, s′, and s″ independently is an integer from 1 to 24; [chemical structure]
wherein * is the bond to ZZ; and s, s′, and s″ are independently is an integer from 1 to 24; [chemical structure]
wherein * is the bond to ZZ and each s, s′, and s″ independently is an integer from 1 to 24; and [chemical structure]
wherein * is the bond to ZZ; s and k are independently is an integer from 1 to 20; and w is an integer from 1 to 10; [chemical structure]
wherein * is the bond to ZZ and w is an integer from 1 to 20; or [chemical structure]
wherein * is the bond to ZZ; k is an integer from 1 to 10.

15-19. (canceled)

20. The compound of claim 1, wherein ZZ:
(i) comprises a group selected from the group consisting of: [chemical structure]
(ii) is -A′-B′-A′-, wherein
each A′ is independently a bond, —O—, —S—, or —N(R^{N3})—, wherein R^{N3} is independently hydrogen or C₁₋₆alkyl and
each B′ is independently CH₂, C(O), C(S), S(O)₂, P(O)(OH), or P(S)(OH);
(iii) is -A′-B′- or -B′-A′- wherein
each A′ is independently —O— or —N(R^{N3})—, wherein R^{N3} is independently hydrogen or C₁₋₆alkyl.
each B′ is independently CH₂, C(O), S(O)₂, P(O)(OH), or P(S)(OH); and
each R^{N3} is independently hydrogen or C₁₋₆alkyl;
(iv) is —CH₂O—, —OCH₂—, —S—S—, —C═N—, —C═N—O—, —C═N—N(R^{N3})—, —N═C—, —O—N═C—, —N(R^{N3})—N═C—, —C(O)N(R^{N3})—, —N(R^{N3})C(O)—, —C(O)O—, —OC(O)—, —OC(O)N(R^{N3})—, —N(R^{N3})C(O)O—, —N(R^{N3})C(O)N(R^{N3})—, —S(O)₂N(R^{N3})—, —N(R^{N3})S(O)₂—, —OP(O)(OH)O—, —OP(S)(OH)O—, —OP(O)(OH)—, —OP(S)(OH)—, —P(O)(OH)O—, or —P(S)(OH)O—. wherein R^{N3} is independently hydrogen or C₁₋₆alkyl;
(iv) is —C(O)N(R^{N3})— or —N(R^{N3})C(O)—, wherein R^{N3} is independently hydrogen or C₁₋₆alkyl; or
(v) is —OP(O)(OH)O—, —OP(S)(OH)O—, —OP(O)(OH)—, —OP(S)(OH)—, —P(O)(OH)O—, or —P(S)(OH)O—.

21-25. (canceled)

26. The compound of claim 1, wherein R^{T1} is -L^{L}-oligonucleotide, wherein L^{L} is a divalent linker that connects to the 3′-end of the oligonucleotide, the 5′-end of the oligonucleotide, or an internal 2′- or 3′ position on an internal nucleotide.

27. The compound of claim 26, wherein L^{L} connects to an oxygen atom on a nucleoside, and is P(O)(OH)—, —P(S)(OH)—, or —P(S)(SH).

28. The compound of claim 27, wherein L^{L} is P(O)(OH)— or P(S)(OH)—.

29. (canceled)

30. The compound of claim 1, wherein R^{T} is R^{T1}, wherein R^{T1} is -L^{L}-oligonucleotide, wherein L^{L} connects to an oxygen atom on a nucleoside of the oligonucleotide, LL is a bond, and the nucleoside is of Formula (X-f), [chemical structure]
wherein B is an optionally modified nucleobase and * represents the bond to ZZ.

31. The compound of claim 30, wherein -L′- is —C₄₋₁₀alkyl-*, wherein * is the bond to ZZ, or
wherein the nucleoside is of a formula selected from the group consisting of [chemical structure]
wherein
B is an optionally modified nucleobase;
each n is independently 0 or an integer selected from 1-10; and
each m is independently integer selected from 1-20.

32. (canceled)

33. The compound of claim 1, wherein R^{T1} is -L^{L}-oligonucleotide and is conjugated at the 5′-end of the oligonucleotide.

34. The compound of claim 33, represented by the following formula: [chemical structure]
wherein Y′ is O or S.

35. The compound of claim 1, wherein R^{T1} is -L^{L}-oligonucleotide and is conjugated at the 3′-end of the oligonucleotide.

36. The compound of claim 35, having represented by the following formula:
(i) [chemical structure]
wherein Y is O or Si
(ii) [chemical structure]
wherein Y′ is O or S, R¹ is hydrogen or C₁₋₆alkyl, and R^{P} is hydrogen or a nitrogen protecting group;
(iii) [chemical structure]
wherein Y′ is O or S, R¹ is hydrogen or C₁₋₆alkyl, and R^{P} is hydrogen or a nitrogen protecting group;
(iv) [chemical structure]
wherein Y′ is O or S, R¹ is hydrogen or C₁₋₆alkyl, and R^{P} is hydrogen or a nitrogen protecting group;
(v) [chemical structure]
wherein each m is independently an integer selected from 1-10; Y′ is O or S, R¹ is hydrogen or C₁₋₆alkyl, and R^{P} is hydrogen or a nitrogen protecting group;
(vi) [chemical structure]
wherein Y′ is O or S, R¹ is hydrogen or C₁₋₆alkyl, and R^{P} is hydrogen or a nitrogen protecting group.

37-41. (canceled)

42. The compound of claim 36, wherein in (vi), R^{P} is hydrogen and R¹ is hydrogen; and/or wherein Y′ is O or S.

43-44. (canceled)

45. A compound comprising a αvβ6 integrin targeting ligand, wherein the compound is of Formula (XV): [chemical structure]
or a salt thereof, wherein
x is 2, 3, 4, 5, 6, 7, or 8;
T is a divalent linking group;
Δ is a branching group;
each ZZ is independently -A′-B′-A′- or a linking group formed by a first reactive pair,
wherein
each A′ is independently a bond, —O—, —S—, or —N(R^{N3})—;
each B′ is independently a bond, CH₂, C(O), C(S), C(NR^{N3}), —C═N—, S(O), S(O)₂, P(O)(OH), P(S)(OH), or P(S)(SH); and
each R^{N3} is independently hydrogen or C₁₋₆alkyl, or two R^{N3} within the -A′-B′-A′- group taken together with the atoms to which they are connected from a 4-8 membered heterocyclyl;
Z⁰ is a member of a second reactive pair; and
R^{T} is -G⁰-OR^{T1}, wherein
G⁰ is -D⁰-E^{U}-F⁰-, wherein
D⁰, E⁰, and F⁰ are independently a bond, C₁₋₁₀alkyl, C₂₋₁₀alkenyl, C₂₋₁₀alkynyl, C₃₋₁₀cycloalkyl, 3-10 membered heterocyclyl, aryl, or heteroaryl, each of which is optionally substituted with 1, 2, 3, or 4 R groups; and
R^{T1} is hydrogen, a hydroxyl protecting group, a phosphorous coupling group, or -L^{K}-S^{S}, or -L^{L}-oligonucleotide, wherein
L^{K} is a support linking group;
S^{S} is a solid support, —OR^{SS} or —N(R^{SS})₂, or hydrogen, wherein
each R^{SS} is independently hydrogen or C₁₋₆alkyl; and
L^{L} is an oligonucleotide linking group; and each Φ is a compound of the Formula (XII), [chemical structure]
wherein:
Y is O, N(H), S, or CH₂;
R¹ is hydrogen or C₁₋₆alkyl;
R^{Y} is [chemical structure]
wherein
m is 0, 1, 2, 3, or 4; and
each R² is independently R, or two R² groups on adjacent carbon atoms taken together with the atoms to which they are bound form a fused 4-8 membered ring that is optionally substituted by 1, 2, 3 or 4 groups independently selected from the group consisting of R and a nitrogen protecting group;
and
R^{L} is —N(R³)(R⁴), —O(R⁵), —S(R⁵), or —R⁵, wherein
(i) R³ is hydrogen or C₁₋₆alkyl and R⁴ is R⁵; or
(ii) R³ and R⁴ taken together with the nitrogen atom to which they are attached form a 4-8 membered monocyclic heterocyclyl group that is substituted with R⁵;
and
R⁵ is -L-* wherein L is -L¹-[G-L²]_{q}-G-L³-*,
* is the bond to a ZZ; and
q is 0 or an integer selected from 1-25;
L¹ is a bond or -B-A-;
each L² is independently -A-B-A-;
L³ is a bond or -A-B-A-;
each G is independently -D-E-F-, wherein
D, E, and F are independently a bond, C₁₋₁₀alkyl, C₂₋₁₀alkenyl, C₂₋₁₀alkynyl, C₃₋₁₀cycloalkyl, 3-10 membered heterocyclyl, aryl, or heteroaryl, each of which is optionally substituted with 1, 2, 3, or 4 R groups;
each A is independently a bond, —O—, —S—, or —N(R^{N})—;
each B is independently a bond, CH₂, C(O), C(S), C(NR^{N}), S(O), S(O)₂, P(O)(OH), P(S)(OH), or P(S)(SH);
each R^{N} is independently hydrogen or C₁₋₆alkyl, or two R^{N} within an -A-B-A- group taken together with the atoms to which they are connected from a 4-8 membered heterocyclyl.

46-109. (canceled)

110. A dsRNA agent for inhibiting the expression of a target gene, comprising the compound comprising an αvβ6 integrin targeting ligand of claim 1.

111. The dsRNA agent of claim 110, wherein the αvβ6 integrin targeting ligand is conjugated to the sense strand.

112. The dsRNA agent of claim 111, wherein the αvβ6 integrin targeting ligand;
(i) is conjugated to the 3′-end of the sense strand;
(ii) is conjugated to the 5′-end of the sense strand;
(iii) is conjugated to both the 5′-end and the 3′-end of the sense strand; or
(iv) is conjugated to the an internal position of the sense strand.

113-115. (canceled)

116. The dsRNA agent of claim 110, wherein the αvβ6 integrin targeting ligand is conjugated to the antisense strand.

117. The dsRNA agent of claim 116, wherein the αvβ6 integrin targeting ligand;
(i) is conjugated to the 3′ end antisense strand; or
(ii) is conjugated to an internal position of antisense strand.

118. (canceled)

119. The dsRNA agent of claim 110, wherein the target gene is selected from the group consisting of adrenoceptor beta 1 (ADRB1); calcium voltage-gated channel subunit alpha1 C (CACNA1C); calcium voltage-gated channel subunit alpha1 G (CACNA1G) (T type calcium cchannel); angiotensin II receptor type 1 (AGTR1); Sodium Voltage-Gated Channel Alpha Subunit 2 (SCN2A); Hyperpolarization Activated Cyclic Nucleotide Gated Potassium Channel 1 (HCN1); Hyperpolarization Activated Cyclic Nucleotide Gated Potassium Channel 4 (HCN4); Hyperpolarization Activated Cyclic Nucleotide Gated Potassium Channel 3 (HCN3); Potassium Voltage-Gated Channel Subfamily A Member 5 (KCNA5); Potassium Inwardly Rectifying Channel Subfamily J Member 3 (KCNJ3); Potassium Inwardly Rectifying Channel Subfamily J Member 4 (KCNJ4); phospholamban (PLN); calcium/calmodulin dependent protein kinase II delta (CAMK2D); and Phosphodiesterase 1 (PDE1); myostatin (MSTN); Cholinergic Receptor Nicotinic Alpha 1 Subunit (CHRNA1); Cholinergic Receptor Nicotinic Beta 1 Subunit (CHRNB1); Cholinergic Receptor Nicotinic Delta Subunit (CHRND); Cholinergic Receptor Nicotinic Epsilon Subunit (CHRNE); Cholinergic Receptor Nicotinic Gamma Subunit (CHRNG); Collagen Type XIII Alpha 1 Chain (COL13A1); Docking Protein 7 (DOK7); LDL Receptor Related Protein 4 (LRP4); Muscle Associated Receptor Tyrosine Kinase (MUSK); Receptor Associated Protein Of The Synapse (RAPSN); Sodium Voltage-Gated Channel Alpha Subunit 4 (SCN4A); Double Homeobox 4 (DUX4); dystrophy myotonic protein kinase (DMPK); glycogen synthase 1 (GYS1); survival of motor neuron 1 (SMN1), and alpha-glucosidase (GAA).

120. A cell containing the dsRNA agent of claim 110.

121. A pharmaceutical composition for inhibiting expression of the target gene, comprising the dsRNA agent of claim 110.

122. A method of inhibiting expression of a target gene in a skeletal muscle cell and/or a cardiac muscle cell, comprising contacting the cell with the dsRNA agent of claim 110, thereby inhibiting expression of the target gene in the skeletal muscle cell and/or the cardiac muscle cell.

123. The method of claim 122, wherein the cell is within a subject.

124. The method of claim 123, wherein the subject is a human.

125. A method of treating a subject having a skeletal muscle disorder and/or a cardiac muscle disorder, comprising administering to the subject a therapeutically effective amount of the dsRNA agent of claim 110, thereby treating the subject.

126. The method of claim 125, wherein the skeletal muscle disorder and/or cardiac muscle disorder is selected from the group consisting of myostatin-related muscle hypertrophy, congenital myasthenic syndrome, facioscapulohumeral muscular dystrophy (FSHD), Spinal Muscular Atrophy (SMA), Myotonic Dystrophy Type 1 (DM1), Pompe disease, PLN cardiomyopathy, spasticity, obstructive hypertrophic cardiomyopathy (HOCM); familial hypertrophic cardiomyopathy (FHC); heart failure with preserved ejection fraction (HFPEF); atrial fibrillation (AFIB); ventricular fibrillation (VFIB); angina; myocardial infarction (MI); heart failure or heart failure with reduced ejection fraction (HFREF); supraventricular tachycardia (SVT); hypertrophic cardiomyopathy (HCM), dilated cardiomyopathy (DCM), arrhythmia, and congestive heart failure (CHF).

127. A method of inhibiting expression of a target gene in a lung cell, comprising contacting the cell with the dsRNA agent of claim 110, thereby inhibiting expression of the target gene in the lung cell.

128. The method of claim 127, wherein the cell is within a subject.

129. The method of claim 128, wherein the subject is a human.

130. A method of treating a subject having a lung disorder, comprising administering to the subject a therapeutically effective amount of the dsRNA agent of claim 110, thereby treating the subject.

131. The method of claim 130, wherein the lung disorder is selected from the group consisting of idiopathic pulmonary fibrosis, asthma, asthma and chronic rhinosinusitis, nasal polyps and chronic rhinosinusitis.

132. The method of claim 122, wherein the dsRNA agent is administered to the subject subcutaneously, intramuscularly, intravenously or via inhalation.

133-135. (canceled)

136. An RNA-induced silencing complex (RISC) comprising an antisense strand of any of the dsRNA agents of claim 110.
